(19) United States
(12) Patent Application Publication
(10) Pub. No.: US 2022/0372101 A1
(43) Pub. Date: Nov. 24, 2022

(54) NOVEL RECEPTORS HAVING A HETEROLOGOUS STOP TRANSFER SEQUENCE FOR LIGAND-DEPENDENT TRANSCRIPTIONAL REGULATION

(71) Applicant: The Regents of the University of California, Oakland, CA (US)

(72) Inventors: Kole T. ROYBAL, Oakland, CA (US); Raymond LIU, Oakland, CA (US); Iowis ZHU, Oakland, CA (US)

(21) Appl. No.: 17/763,110

(22) PCT Filed: Sep. 23, 2020
(86) PCT No.: PCT/US2020/052337

§ 371 Date: Mar. 23, 2022

Related U.S. Application Data
(60) Provisional application No. 62/905,262, filed on Sep. 24, 2019.

(51) Int. Cl. C07K 14/705; C07K 14/47; C07K 16/28; A61P 35/02; A61K 35/17; A61K 45/06; A61K 39/395; A61K 38/17; C07K 14/575; A61K 38/22; A61P 35/00

(52) U.S. Cl. CPC C07K 14/705; C07K 14/47; C07K 16/2803; A61P 35/02; A61K 35/17; A61K 45/06; A61K 39/3955; A61K 38/1709; A61K 38/1774; C07K 14/70517; C07K 14/575; A61K 38/22; A61K 38/177; A61P 35/00; A61K 2039/505

(57) ABSTRACT

The present disclosure generally relates to, among other things, a new class of receptors engineered to modulate transcription in a ligand-dependent manner. The new receptors provide a selectable degree of noise, expression level, and signal to noise ratio. The disclosure also provides compositions and methods useful for producing such receptors, nucleic acids encoding same, host cells genetically modified with the nucleic acids, as well as methods for modulating an activity of a cell and/or for the treatment of various health conditions or diseases, such as cancers.

### CROSS-REFERENCE TO RELATED APPLICATIONS

[0001] This application claims priority to U.S. Provisional Patent Application No. 62/905,262, filed Sep. 24, 2019, the disclosure of which is incorporated by reference herein in its entirety, including any drawings.

### STATEMENT REGARDING FEDERALLY SPONSORED R&D

[0002] This invention was made with government support under grant no. OD025751 awarded by The National Institutes of Health. The government has certain rights in the invention.

### INCORPORATION OF THE SEQUENCE LISTING

[0003] This application contains a Sequence Listing which is hereby incorporated by reference in its entirety. The accompanying Sequence Listing text file, named “048536_657001WO_Sequence_Listing_ST25.txt,” was created on Sep. 23, 2020 and is 828 KB.

### FIELD

[0004] The present disclosure relates generally to new synthetic cellular receptors that bind cell-surface ligands and have selectable specificities and activities. The disclosure also provides compositions and methods useful for producing such receptors, nucleic acids encoding same, host cells genetically modified with the nucleic acids, as well as methods for modulating an activity of a cell and/or for the treatment of various health conditions or diseases, such as cancers.

### BACKGROUND

[0005] An important problem which limits the development of engineered cell therapies in humans is the ability to regulate therapeutic gene expression and engineered cell activity. For example, the first generation of chimeric antigen receptor T cells (CAR-T) lack the ability to modulate or turn off CAR-T activity when needed; other problems include off-target activity and off-tumor/on-target activity (i.e., wherein the CAR-T target antigen is also found on normal cells outside the tumor). One possible solution to these problems is to use a synthetic receptor that is capable of modifying gene expression and/or cellular behavior.

[0006] Notch receptors are transmembrane proteins that mediate cell-cell contact signaling and play a central role in development and other aspects of cell-to-cell communication, e.g., communication between two contacting cells, in which one contacting cell is a “receiver” cell and the other contacting cell is a “sender” cell. Notch receptors expressed in a receiver cell recognize their ligands (the delta/serrate/lag, or “DSL” family of proteins) expressed on a sending cell. The engagement of notch and delta on these contacting cells leads to a two-step proteolysis of the notch receptor, which ultimately causes the release of the intracellular portion of the receptor (“ICD”) from the membrane into the cytoplasm. Notch has a matrix metalloprotease cleavage site (denoted “S2”), which, when the receptor is not activated is protected from cleavage by the Notch negative regulatory region (“NRR”). The NRR consists of three LIN-12-Notch repeat (“LNR”) modules and a heterodimerization domain (“HD”). It is believed that this proteolysis is regulated by the force exerted by the sending cell: the DSL ligand pulls on the Notch receptor, which changes the conformation of the NRR and exposes the metalloprotease site. This is cleaved by a constitutively active protease (such as ADAM10), which releases the extracellular binding portion and negative regulatory region of the receptor. Release of the ligand binding portion of the receptor in turn exposes another cleavage site (denoted “S3”), which is cleaved by γ-secretase within the cell membrane: this cleavage releases the nuclear homing ICD from the cell membrane. W.R. Gordon et al., Dev Cell (2015) 33:729-36. This released domain alters receiver cell behavior by regulating transcription. Notch receptors are involved in and are required for a variety of cellular functions during development, and are important for the function of a vast number of cell-types across species.

[0007] Examples of existing first-generation synthetic derivatives of Notch receptors, which are often referred to as “SynNotch,” employ this straightforward signaling behavior by replacing the extracellular ligand-binding domain, which in wild-type Notch contains multiple EGF-like repeats, with an antibody derivative, and replacing the cytoplasmic domain with a transcription activator of choice, but still relying on the Notch NRR (L. Morsut et al., Cell (2016) 164:780-91) and the standard two-step proteolysis described above. Additionally, the NRR spans approximately 160 amino acids, making this domain alone about three times the size of some mature proteins, such as insulin or epidermal growth factor (EGF). This makes expression of the receptor less efficient, and can exceed the capacity of some widely used cloning and transfection vectors.

[0008] Receptors, whether native or synthetic, have varying characteristics, such as noise (i.e., the level of expression induced in the absence of the intended ligand), and signal or sensitivity (the amount of expression induced by binding of the intended ligand). Generally, Notch and SynNotch signaling correlates with ligand binding, but it is difficult to adjust the sensitivity and response of the receptor. More tools are needed in order to provide synthetic receptors with a wide range of characteristics.

### SUMMARY

[0009] The present disclosure describes a previously unknown feature of Notch and SynNotch receptors, the stop-transfer sequence (STS). The STS comprises a charged, lipophobic sequence. Without being bound by any theory, the STS serves as a membrane anchor, and is believed to prevent passage of the intracellular domain into the plasma membrane. Surprisingly, altering this sequence dramatically affects the signal characteristics, such as the noise and expression/signal levels, of the receptor. The disclosure provides synthetic chimeric receptors that exhibit a range of signal characteristics determined by the STS. These receptors provide a range of sensitivity, including a receptor that is sensitive to the degree of T cell activation when it is expressed in a T cell. In such receptors, when expressed in a T cell, a higher ligand-induced signal is obtained when the T cell is activated, as compared to the ligand-induced signal when the T cell is not activated.

[0010] The present disclosure provides, inter alia, novel receptors containing a heterologous STS. Since this feature prevents the receptor from being pulled through the plasma membrane during ligand binding, it is believed that the modulation of the STS facilitates the optimization and/or improvement of the expression and activity of the chimeric receptors disclosed herein, which in turn can be particularly useful in modulating cell activity and/or in treating health conditions (e.g., diseases).

[0011] In one aspect, provided herein is a chimeric receptor polypeptide comprising, from N-terminus to C-terminus: (a) an extracellular ligand-binding domain having a binding affinity for a selected ligand; (b) a linking polypeptide having: (i) at least about 80% sequence identity to a Notch juxtamembrane domain (JMD); (ii) at least about 80% sequence identity to a Notch JMD in which the LIN-12-Notch repeat (LNR) and/or a heterodimerization domain (HD) of a Notch receptor has been deleted; (iii) at least about 80% sequence identity to a polypeptide hinge domain; (iv) at least about 80% sequence identity to a Robo1 JMD including at least one fibronectin repeat; or (v) a polypeptide having about 2 to about 40 amino acids; (c) a transmembrane domain (TMD) comprising one or more ligand-inducible proteolytic cleavage sites; (d) an STS, wherein the STS is heterologous to the TMD; and (e) an intracellular domain (ICD) comprising a transcriptional regulator, wherein binding of the selected ligand to the extracellular ligand-binding domain induces cleavage at the ligand-inducible proteolytic cleavage site between the transcriptional regulator and the linking polypeptide.

[0012] Non-limiting exemplary embodiments of the chimeric polypeptides provided herein include chimeric polypeptides wherein the STS is selected from the group of STS sequences consisting of APLP1, APLP2, APP, TGBR3, CSF1R, CXCL16, CX3CL1, DAG1, DCC, DNER, DSG2, CDH1, GHR, HLA-A, IFNAR2, IGF1R, IL1R1, ERN2, KCNE1, KCNE2, CHL1, LRP1, LRP2, LRP18, PTPRF, SCN1B, SCN3B, NPR3, NGFR, PLXDC2, PAM, AGER, ROBO1, SORCS3, SORCS1, SORL1, SDC1, SDC2, SPN, TYR, TYRP1, DCT, VASN, FLT1, CDH5, PKHD1, NECTIN1, KL, IL6R, EFNB1, CD44, CLSTN1, LRP8, PCDHGC3, NRG1, LRP1B, JAG2, EFNB2, DLL1, CLSTN2, EPCAM, ErbB4, KCNE3, CDH2, NRG2, PTPRK, BTC, EPHA4, IL1R2, KCNE4, SCN2B, Nradd, PTPRM, Notch1, Notch2, Notch3, and Notch4.

[0013] In some embodiments, the extracellular domain includes an antigen-binding moiety capable of binding to a ligand on the surface of a cell. In some embodiments, the cell is a pathogen. In some embodiments, the ligand includes a protein or a carbohydrate. In some embodiments, the ligand is selected from the group consisting of CD1, CD1a, CD1b, CD1c, CD1d, CD1e, CD2, CD3d, CD3e, CD3g, CD4, CD5, CD7, CD8a, CD8b, CD19, CD20, CD21, CD22, CD23, CD25, CD27, CD28, CD33, CD34, CD40, CD45, CD48, CD52, CD59, CD66, CD70, CD71, CD72, CD73, CD79A, CD79B, CD80 (B7.1), CD86 (B7.2), CD94, CD95, CD134, CD140 (PDGFR4), CD152, CD154, CD158, CD178, CD181 (CXCR1), CD182 (CXCR2), CD183 (CXCR3), CD210, CD246, CD252, CD253, CD261, CD262, CD273 (PD-L2), CD274 (PD-L1), CD276 (B7H3), CD279, CD295, CD339 (JAG1), CD340 (HER2), EGFR, FGFR2, CEA, AFP, CA125, MUC-1, MAGE, BCMA (CD269), ALPPL2, GFP, eGFP, and SIRPα.

[0014] In another aspect, provided herein are nucleic acids comprising a nucleotide sequence encoding a chimeric polypeptide as disclosed herein. In some embodiments, the nucleotide sequence is incorporated into an expression cassette or an expression vector.

[0015] In another aspect, provided herein are recombinant cells including (a) a chimeric polypeptide as disclosed herein and/or (b) a recombinant nucleic acid as disclosed herein. In another aspect, further provided herein are cell cultures including at least one recombinant cell as disclosed herein and a culture medium.

[0016] In another aspect, provided herein are pharmaceutical compositions including a pharmaceutically acceptable carrier and one or more of the following: (a) a recombinant nucleic acid as disclosed herein, and (b) a recombinant cell as disclosed herein. In some embodiments, the disclosed pharmaceutical composition includes a recombinant nucleic acid as disclosed herein and a pharmaceutically acceptable carrier. In some embodiments, the recombinant nucleic acid is encapsulated in a viral capsid or a lipid nanoparticle.

[0017] In another aspect, provided herein are methods for modulating an activity of a cell, including: (a) providing a recombinant cell of the disclosure, and (b) contacting it with a selected ligand, wherein binding of the selected ligand to the extracellular binding domain induces cleavage of a ligand-inducible proteolytic cleavage site and releases the transcriptional regulator, wherein the released transcriptional regulator modulates an activity of the recombinant cell. Another aspect relates to methods for inhibiting an activity of a target cell in an individual, including administering to the individual an effective number of the recombinant cell of the disclosure, wherein the recombinant cell inhibits an activity of the target cell in the individual.

[0018] In another aspect, provided herein are methods for treating a health condition (e.g., disease) in an individual, the methods comprising a step of administering to the individual an effective number of the recombinant cell of the disclosure, wherein the recombinant cell treats the health condition in the individual.

[0019] In another aspect, provided herein are systems for modulating an activity of a cell, inhibiting a target cancer cell, or treating a health condition (e.g., disease) in an individual in need thereof, wherein the system includes one or more of: a chimeric polypeptide of the disclosure; a polynucleotide of the disclosure; a recombinant cell of the disclosure; or a pharmaceutical composition of the disclosure.

[0020] In another aspect, provided herein are methods for making a recombinant cell of the disclosure, including: (a) providing a cell capable of protein expression; and (b) contacting the provided cell with a recombinant nucleic acid of the disclosure. In some embodiments, the cell is obtained by leukapheresis performed on a sample obtained from a human subject or patient, and the cell is contacted ex vivo. In some embodiments, the recombinant nucleic acid is encapsulated in a viral capsid or a lipid nanoparticle.

[0021] In another aspect, provided herein is the use of one or more of: a chimeric polypeptide of the disclosure, a polynucleotide of the disclosure, a recombinant cell of the disclosure, or a pharmaceutical composition of the disclosure, for the treatment of a health condition (e.g., disease). In some embodiments, the health condition is cancer.

[0022] In another aspect, provided herein is the use of one or more of: a chimeric polypeptide of the disclosure, a polynucleotide of the disclosure, a recombinant cell of the disclosure, or a pharmaceutical composition of the disclosure, in the manufacture of a medicament for the treatment of a health condition (e.g., disease).

[0023] The foregoing summary is illustrative only and is not intended to be in any way limiting. In addition to the illustrative embodiments and features described herein, further aspects, embodiments, objects and features of the disclosure will become fully apparent from the drawings and the detailed description and the claims.

### BRIEF DESCRIPTION OF THE DRAWINGS

[0024] FIG. 1 schematically illustrates differences between a SynNotch receptor, an Fn Notch receptor, a Mini Notch receptor, a Minimal linker Notch receptor, and a Hinge Notch receptor. The SynNotch receptor differs from the wild-type Notch receptor in that the large extracellular ligand-binding region comprising EGF repeats is replaced with a heterologous extracellular ligand-binding domain, in this example, with an scFv specific for the CD19 B-cell antigen. In the exemplary Fn Notch receptor, the Notch regulatory region and juxtamembrane domain has been deleted and replaced with a truncated Robo1 juxtamembrane domain that includes three fibronectin repeats (Fn). In the exemplary Mini Notch receptor, the Notch negative regulatory region (NRR) that is present in SynNotch is deleted. In the exemplary Minimal Linker Notch receptor, all of the extracellular Notch sequence is deleted and replaced with a linking polypeptide, such as a (GGS)ₙ linker. In the exemplary Hinge Notch receptor, the extracellular Notch sequence is deleted and replaced with a linking polypeptide domain that promotes oligomerization, such as dimerization or trimerization, in this example based on the hinge region of CD8α.

[0025] FIGS. 2A-2B depict a schematic synNotch receptor and reporter system as used in Example 5. In an exemplary experiment, as shown in FIG. 2A, T cells express the receptor and carry a reporter plasmid containing transcription factor-specific response elements (e.g., UAS response elements recognized by Gal4-VP64 transcriptional activators) driving a fluorescent reporter protein (e.g., BFP). SynNotch receptor activation is measured by recording the BFP reporter signal in T cells after co-incubation with cell expressing a target surface antigen (e.g., CD19). An example of a “successful” synNotch activation is shown as a flow cytometry histogram, with BFP reporter signal on the x-axis and counts on the y-axis. A representative synNotch receptor activation plot is depicted, where a CD19-presenting cell (for example, a K562 CD19+ cell) induces BFP expression and signal greater than control cells (e.g., K562 without CD19). Screening is performed with synNotch receptors containing STS sequences from a library of Type 1 receptor proteins reported to be regulated by gamma (γ) secretase activity. FIG. 2B schematically depicts the array of receptor proteins tested in Example 5, with the protein that was the source of the STS indicated. “Reporter” was a control T cell, a T cell carrying the reporter plasmid, but without a receptor of the disclosure.

[0026] FIG. 3 shows a heat map array of receptor protein expressions in Jurkat T cells as tested in Example 5 (as measured by myc tag expression), with the STS protein source indicated. This demonstrated that the choice of STS sequence affects the expression level of the receptor.

[0027] FIG. 4 shows an array of flow cytometry overlay plot diagrams, depicting BFP signals from Jurkat T cells expressing synNotch receptors when incubated with CD19− or CD19+ K562 target cells. The STS sources in the array are as shown in FIG. 2B and FIG. 3.

[0028] FIG. 5 shows a heat map of percent positive Jurkat T cells expressing the BFP reporter, subtracted from background levels of activation and normalized for myc-tag expression, as described in Example 5.

[0029] FIGS. 6A-6C schematically depicts validation of STS screen hits in the Hinge-Notch scaffold. FIG. 6A shows a diagram for a truncated Hinge Notch receptor having a heterologous STS. The STS is located immediately C-terminal to the TMD. A library of truncated Hinge Notch receptors was constructed, each having one of ten different STSs. The STS source proteins used were, in order of decreasing activation level: EPCAM (Uniprot ID P16422), LRP18 (ID Q9ZR2), JAG2 (ID Q9Y219), PTPRK (ID Q15262), NOTCH2 (ID Q04721), NRG2 (ID 014511), PTPRM (ID P28827), CXCL16 (ID Q9H2A7), NRG1 (ID Q02297), and GHR (ID P10912). In FIG. 6B, primary human T cells were activated with anti-CD3/anti-CD28 Dynabeads (Gibco) and transduced with two lentiviral constructs expressing either a receptor or a transcriptional reporter construct. Receptor expression was measured using an AlexaFluor647-tagged anti-myc antibody (Cell Signaling). Reporter expression was measured through a constitutive mCitrine gene located on the reporter plasmid. Double positive cells were sorted for myc tag and mCitrine expression on Day 5 post initial T cell stimulation, and expanded further for activation testing. 1×10⁵ double positive T cells expressing anti-CD19 scFv were co-cultured with: no additions (upper trace), 1×10⁵ K562 cells (middle trace), or 1×10⁵ CD19+ K562 cells (lower trace) for 24 hours. Transcriptional activation of an inducible BFP reporter gene was subsequently measured using a Fortessa X-50 (BD Biosciences). FIG. 6C shows overlaid activation histograms of STS hits with the Hinge Notch receptor.

[0030] FIGS. 7A-7C schematically depict validation of STS screen hits in the Mini Notch scaffold. Mini Notch receptors constructed with heterologous STS. The STS is found immediately C-terminal to the TMD. Here, as shown in FIG. 7A, the heterologous STS is defined as a region of basic residues (R, K, H) that terminates before two consecutive non-basic residues. The STS source proteins used were, in order of decreasing activation level: EPCAM, PTPRK, NOTCH2, PTPRM, LRP1B, GHR, JAG2, NRG2, CXCL16, and NRG1. In FIG. 7B, primary human T cells were activated with anti-CD3/anti-CD28 Dynabeads (Gibco) and transduced with two lentiviral constructs expressing either a receptor or a transcriptional reporter construct. Receptor expression was measured using an AlexaFluor647-tagged anti-myc antibody (Cell Signaling). Reporter expression was measured through a constitutive mCitrine gene located on the reporter plasmid. Double positive cells were sorted for on Day 5 post initial T cell stimulation and expanded further for activation testing. 1×10⁵ double positive T cells expressing anti-CD19 receptors are co-cultured with: no additions (upper trace), 1×10⁵ K562 cells (middle trace), or 1×10⁵ CD19+ K562 cells (lower trace) for 24 hours. Transcriptional activation of an inducible BFP reporter gene was measured using a Fortessa X-50 (BD Biosciences). The flow histograms for each receptor are shown in FIG. 7B. FIG. 7C shows the overlaid histograms for all of the constructs.

[0031] FIG. 8 shows the results of experiments comparing the Notch1 STS with the Notch2 STS. Receptors were constructed with SynNotch (using Notchl), Mini Notch1, and Hinge Notch, each with either the Notch1 STS or the Notch2 STS. Primary human T cells were activated with anti-CD3/anti-CD28 Dynabeads (Gibco) and transduced with two lentiviral constructs expressing either a receptor or a transcriptional reporter construct. Receptor expression was measured using an AlexaFluor647-tagged anti-myc antibody (Cell Signaling). Reporter expression was measured through a constitutive mCitrine gene located on the reporter plasmid. Double positive cells were sorted for on Day 5 post initial T cell stimulation and expanded further for activation testing. 1×10⁵ double positive T cells expressing anti-CD19 receptors are co-cultured with: no additions (upper trace), 1×10⁵ K562 cells (middle trace), or 1×10⁵ CD19+ K562 cells (lower trace) for 24 hours. Transcriptional activation of an inducible BFP reporter gene was subsequently measured using a Fortessa X-50 (BD Biosciences). The resulting histograms are shown in the left panels of FIG. 8. The right panel of FIG. 8 shows the same data as a bar graph.

[0032] FIG. 9 schematically summarizes the results from experiments performed to test Hinge-Notch variants with different binding domains and their dependence on proteolytic activity. Primary human CD4+ T-cells were activated with anti-CD3/anti-CD28 Dynabeads and transduced with two lentiviral constructs, one expressing a hinge receptor with indicated binding head truncation variant receptor, and the other a transcriptional reporter. Cells containing both constructs were sorted on Day 5 post initial T-cell stimulation and expanded further for activation testing. For testing, 1×10⁵ double positive T-cells expressing receptors were co-cultured with 1×10⁵ K562 cells (top trace), 1×10⁵ Ligand+K562 cells (second trace from top), 1×10⁵ Ligand+K562 cells with an ADAM10 inhibitor (third trace from top), or 1×10⁵ Ligand+K562 cells with a gamma-secretase inhibitor, DAPT (bottom trace). Transcriptional activation of an inducible BFP reporter gene was subsequently measured using a Fortessa X-50.

[0033] FIG. 10 schematically summarizes the results from experiments performed to compare activation of Hinge-Notch variants with different promoters and STS domains. For testing, 1×10⁵ double positive T-cells expressing anti-CD19 receptors were co-cultured with no additions (top trace), 1×10⁵ ALPPL2+ K562 cells (second trace from top), 1×10⁵ CD19+ K562 cells (third trace from top), or 1×10⁵ ALPPL2+ CD19+ K562 cells (bottom trace). Transcriptional activation of an inducible BFP reporter gene was subsequently measured using a Fortessa X-50. Activation using murine and human original synNotch constructs were included for comparison.

[0034] FIG. 11 schematically summarizes the results from experiments for mutational analysis for the transmembrane domain (TMD) and the STS domain in Hinge-Notch constructs. Four types of exemplary Hinge Notch receptors were used in this Example, all of which including an anti-CD19 scFv domain, a truncated CD8 Hinge domain, and a Gal4VP64 domain, plus different TMD domains (CLSTN1 TMD or CLSTN2 TMD) and different STS domains (CLSTN1 STS, CLSTN2 STS, or Notch1 STS). Primary human CD4+ T-cells were activated with anti-CD3/anti-CD28 Dynabeads (Gibco) and transduced with two lentiviral constructs, one expressing a hinge receptor with TMD/STS combination as indicated, and the other a transcriptional reporter with constitutively expressed anti-ALPPL2 CAR. Cells containing both constructs were sorted for on Day 5 post initial T-cell stimulation and expanded further for activation testing. For testing, 1×10⁵ double positive T-cells expressing receptors were co-cultured with: 1×10⁵ K562 cells (“−CAR” panels, blue), or 1×10⁵ CD19+K562 cells (“−CAR” panels, red). Similarly, 1×10⁵ double positive T-cells expressing receptors were tested in the presence of CAR activity by co-culture with 1×10⁵ ALPPL2+ K562 cells (“+CAR” panels, blue), or 1×10⁵ ALPPL2+ CD19+ K562 cells (“+CAR” panels, red). Transcriptional activation of an inducible BFP reporter gene was subsequently measured using a Fortessa X-50 (BD Biosciences).

[0035] FIGS. 12A-12 schematically summarize the results from experiments for tunable, ligand-dependent expansion of T cells using Hinge-Notch-controlled expression of an engineered cytokine. FIG. 12A shows a diagram of T cells engineered with Hinge-Notch STS variants to provide ligand-triggered secretion of an engineered cytokine for autocrine and paracrine expansion of T cells. Expression profile of anti-CD19 Hinge-Notch receptors with the indicated STS modifications are shown in FIG. 12B. Primary human T-cells were activated with anti-CD3/anti-CD28 Dynabeads and transduced with two lentiviral constructs, one expressing a CAR against the MCAM antigen, and one expressing a Hinge-Notch receptor with inducible super-IL2 under Gal4-UAS control. Cells containing both constructs were sorted on Day 5 post initial T-cell stimulation and expanded further for activation testing. Receptor expression was determined by anti-myc-tag staining (y-axis).

[0036] FIG. 13 schematically summarizes the results from experiments performed to demonstrate that ligand-triggered expression of super-IL2 improves cell viability of CAR-T cells. 1×10⁵ double positive T-cells expressing anti-CD19 HingeNotch Notch1 STS receptors were co-cultured in media without IL-2, with no K562 cells (top left), with CD19+ K562 cells to trigger Hinge-Notch (top right), with MCAM+ K562 cells to trigger CAR activation (bottom left) or with MCAM+ and CD19+ K562 cells to trigger activation of both receptors (bottom right). After 9 days the proportion of live T cells by forward and side-scatter measurements using a Fortessa X-50 was assessed.

[0037] FIG. 14 schematically summarizes the results from experiments performed to demonstrate tunable proliferation of T cells with STS-variants of Hinge-Notch. Primary human T-cells were activated with anti-CD3/anti-CD28 Dynabeads and transduced with two lentiviral constructs, one expressing a CAR against the MCAM antigen, and one expressing a Hinge-Notch receptor with inducible super-IL2 under Gal4-UAS control (the right four panels). Hinge-Notch receptors containing 3 different STS variants (NRG1, Notch1, Notch2) were tested against a no Hinge-Notch control. Similarly, primary human T-cells were generated without CAR expression (left panels). T cells were stained with CellTrace Violet according to manufacturer's protocols, co-incubated with CD19+ K562 target cells in media without IL-2 and measured using a Fortessa X-50 at the indicated timepoints to assess proliferation by CTV signal decay.

[0038] FIGS. 15A-15B schematically summarize the results from experiments performed to demonstrate tunable secretion of super-IL2 with STS-variants of Hinge-Notch. Primary human T-cells were activated with anti-CD3/anti-CD28 Dynabeads and transduced with a lentiviral construct Hinge-Notch receptor with inducible super-IL2 under Gal4-UAS control

[0039] (FIG. 15A). Hinge-Notch receptors containing 3 different STS variants (NRG1, Notch1, Notch2) were tested against a no HingeNotch control. T cells were co-incubated with MCAM+ CD19+ K562 cells in media lacking IL-2, and at the indicated timepoints, supernatant IL-2 was measured using the Instant ELISA Kit according to manufacturer's protocols with a microplate reader. Red dotted line indicates a standard concentration of IL-2 used for culturing T cells. Graded secretion of super-IL2 was achieved by activation of STS-tuned Hinge-Notch receptors. For FIG. 15B, primary human T-cells were generated with an additional lentiviral vector expressing a CAR against MCAM.

[0040] FIG. 16 schematically summarizes the results from experiments performed to demonstrate tunable secretion of super-IL2 with STS-variants of Hinge-Notch enhances proliferation of bystander T cells. Primary human T-cells were activated with anti-CD3/anti-CD28 Dynabeads and transduced with a lentiviral construct comprising a Hinge-Notch receptor with inducible super-IL2 under Gal4-UAS control (right panels). HingeNotch receptors containing 3 different STS variants (NRG1, Notch1, Notch2) were tested against a no HingeNotch control. HingeNotch T cells were co-incubated with “bystander” T cells stained with CellTrace Far Red expressing a CAR against MCAM (left panel) or with no CAR (right panel). T cells were co-incubated with MCAM+ CD19+ K562 cells in media lacking IL-2, and proliferation of the bystander T cells were assessed by measuring signal decay on a Fortessa X-50.

[0041] FIG. 17 schematically summarizes the results from experiments performed to test single lentiviral vector constructs containing Hinge-Notch receptors CAR circuits. Primary human T-cells were activated with anti-CD3/anti-CD28 Dynabeads and transduced with a single lentiviral construct containing constitutively expressed Hinge-Notch receptors with an inducible anti-MCAM CAR cassette under Gal4-UAS control. Cells were sorted for Hinge-Notch receptor expression via myc-tag on Day 5 post initial T-cell stimulation and expanded further for activation testing. Three STS-variants were tested as indicated, with constitutively expressed CAR used as a control. For testing, 1×10⁵ T cells expressing anti-CD19 receptors were co-cultured with: no additions (upper trace), 5×10⁵ K562 cells (middle trace), or 5×10⁴ CD19+ K562 cells (lower trace). Transcriptional activation of the inducible CAR was subsequently measured by a GFP tag using a Fortessa X-50.

[0042] FIG. 18 schematically summarizes the results from experiments performed to demonstrate specific dual antigen target cell killing by T cells engineered with a single lentivector containing a HingeNotch CAR circuit. Primary human T-cells were activated with anti-CD3/anti-CD28 Dynabeads and transduced with a single lentiviral construct containing constitutively expressed HingeNotch -receptors with an inducible anti-MCAM CAR cassette under Gal4-UAS control. Cells were sorted for Hinge-Notch receptor expression via myc-tag on Day 5 post initial T-cell stimulation and expanded further for activation testing. Three STS-variants were tested as indicated, with constitutively expressed CAR used as a control. For testing, 1×10⁵ T-cells expressing anti-CD19 receptors were co-cultured with 5×10⁵ MCAM+ K562 cells or 5×10⁴ MCAM+ CD19+ K562 cells. Target cell killing was assessed by forward/side-scatter of the K562 population using a Fortessa X-50.

[0043] FIG. 19 schematically summarizes the results from experiments performed for testing single lentiviral vector constructs containing Hinge-Notch receptors for control of T cell activation and exhaustion. Primary human T-cells were activated with anti-CD3/anti-CD28 Dynabeads and transduced with a single lentiviral construct containing constitutively expressed Hinge-Notch receptors with an inducible anti-MCAM CAR cassette under Gal4-UAS control. Cells were sorted for Hinge-Notch receptor expression via myc-tag on Day 5 post initial T-cell stimulation and expanded further for activation testing. Three STS-variants were tested as indicated, with constitutively expressed CAR used as a control. For testing, 1×10⁵ T-cells expressing anti-CD19 receptors were co-cultured with 5×10⁴ CD19+ K562 cells. Transcriptional activation of the inducible CAR was subsequently measured by a GFP tag using a Fortessa X-50 (the left most panel). T cell activation and exhaustion were measure by expression of CD25 (the second panel from the left side) and CD39 (the third and fourth panels from the left side), respectively.

[0044] FIG. 20 schematically summarizes the results from experiments performed for in vivo testing of Hinge-Notch-to-CAR circuits. For unilateral tumors, NOD.Cg-Prkdc^{scid}Il2rg^{tm1Wjl}/SzJ (NSG) mice were implanted with 1×10⁶ K562-BCMA/CD19 tumor cells subcutaneously on the left flank. For contralateral tumors, NSG mice were implanted with 1×10⁶ K562-BCMA/CD19 tumor cells on the left flank and with 1×10⁶ K562-CD19 tumor cells on the right flank. Four days after tumor implantation, 2.5×106 engineered primary human CD4+ and CD8+ T cells (total of 5×10⁶ T cells) were infused i.v. through tail vein injection. Tumor size was monitored via caliper 2-3 per week and mice were determined to have reached endpoint when tumors measured ≥20 mm. For immunophenotypic analysis, tumors and spleens were harvested 10 days post T cell implantation. Tumors were manually minced and digested in RPMI-1640 with 4 mg/ml Collagenase IV and 0.1 mg/ml DNase I at 37° C. for 30 min and spleens were manually dissociated and subjected to red blood cell lysis. The following antibodies were used: anti- CD45, anti-CD3, anti-CD4, and anti-CD8. Dead cells were excluded with Draq7. Samples were analyzed using FACSymphony X50 SORP and data was analyzed using FlowJo software.

### DETAILED DESCRIPTION OF THE DISCLOSURE

[0045] The present disclosure generally relates to, among other things, a new class of engineered chimeric polypeptide receptors which modulate transcriptional regulation in a ligand-dependent manner. These new receptors have heterologous stop-transfer sequences, which permit the construction of receptors having a broad range of desired characteristics. For example, by altering the STS as described herein, and selecting different juxtamembrane domains, one can produce receptors having different noise levels (i.e., the basal level of receptor activation in the absence of the selected target ligand), different signal levels (i.e., the expression level obtained in the presence of the selected target ligand), and different signal:noise ratios. This principle is applicable to a variety of Notch-like Type 1 receptors, including SynNotch, as further described herein.

[0046] The general structure of the synthetic receptors of the disclosure is a single-span transmembrane protein (i.e., Type 1) having a TMD that has a cleavage site for γ-secretase, comprising from N-terminus to C-terminus (1) an extracellular ligand-binding domain; (2) a linking polypeptide joining the extracellular ligand-binding domain and the TMD; (3) a transmembrane domain comprising one or more protease cleavage sites; (4) an STS; and (5) an intracellular domain that includes a transcriptional regulator.

[0047] Several distinct classes of synthetic receptor are discussed and/or disclosed herein. As depicted schematically in FIG. 1, “SynNotch” receptors comprise a heterologous extracellular ligand binding domain, a linking polypeptide having substantial sequence identity with a Notch receptor including the NRR, a TMD, and an ICD. “Fn Notch” receptors comprise a heterologous extracellular ligand binding domain, a linking polypeptide having substantial sequence identity with a Robo receptor (such as a mammalian Robo1, Robo2, Robo3, or Robo4), followed by 1, 2, or 3 fibronectin repeats (“Fn”), a TMD, and an ICD. “Mini Notch” receptors comprise a heterologous extracellular ligand binding domain, a linking polypeptide having substantial sequence identity with a Notch receptor (lacking the NRR), a TMD, and an ICD. “Minimal Linker Notch” receptors comprise a heterologous extracellular ligand binding domain, a linking polypeptide lacking substantial sequence identity with a Notch receptor (e.g., a synthetic (GGS)ₙ polypeptide sequence), a TMD, and an ICD. “Hinge Notch” receptors comprise a heterologous extracellular ligand binding domain, a hinge sequence comprising an oligomerization domain (i.e., a domain that promotes dimerization, trimerization, or higher order multimerization with a synthetic receptor and/or an existing host receptor), a TMD, and an ICD. Surprisingly, the MiniNotch, Fn Notch, Hinge Notch, and Minimal Linker Notch receptors, even though derived from Notch, do not require the Notch regulatory regions previously thought to be essential for the activity of the receptors. All of these receptor classes are synthetic, recombinant, and do not occur in nature. In some embodiments, the non-naturally occurring receptors disclosed herein bind a target cell-surface displayed ligand, which triggers proteolytic cleavage of the receptors and release of a transcriptional regulator that modulates a custom transcriptional program in the cell. The disclosure also provides compositions and methods useful for producing such receptors, nucleic acids encoding same, host cells genetically modified with the nucleic acids, as well as methods for modulating an activity of a cell and/or for the treatment of various health conditions or diseases, such as cancers.

[0048] In the following detailed description, reference is made to the accompanying drawings, which form a part hereof. In the drawings, similar symbols generally identify similar components, unless context dictates otherwise. The illustrative alternatives described in the detailed description, drawings, and claims are not meant to be limiting. Other alternatives may be used and other changes may be made without departing from the spirit or scope of the subject matter presented here. It will be readily understood that the aspects, as generally described herein, and illustrated in the Figures, can be arranged, substituted, combined, and designed in a wide variety of different configurations, all of which are explicitly contemplated and make part of this application.

[0049] Although various features of the disclosures may be described in the context of a single embodiment, the features may also be provided separately or in any suitable combination. Conversely, although the disclosures may be described herein in the context of separate embodiments for clarity, the disclosures may also be implemented in a single embodiment. Any published patent applications and any other published references, documents, manuscripts, and scientific literature cited herein are incorporated herein by reference for any purpose. In addition, the materials, methods, and examples are illustrative only and not intended to be limiting.

### DEFINITIONS

[0050] The singular form “a”, “an”, and “the” include plural references unless the context clearly dictates otherwise. For example, the term “a cell” includes one or more cells, including mixtures thereof. “A and/or B” is used herein to include all of the following alternatives: “A”, “B”, “A or B”, and “A and B.”

[0051] The terms “administration” and “administering”, as used herein, refer to the delivery of a composition or formulation by an administration route including, but not limited to, intravenous, intra-arterial, intracerebral, intrathecal, intramuscular, intraperitoneal, subcutaneous, intramuscular, and combinations thereof. The term includes, but is not limited to, administration by a medical professional and self-administration

[0052] The term “heterologous” refers to a polypeptide sequence or domain which is not native to a flanking sequence, e.g., wherein the heterologous sequence is not found in nature coupled to the polypeptide sequences occurring at one or both ends. Thus, for example, a Notch4 STS is heterologous to a Notch1 TMD.

[0053] The terms “host cell” and “recombinant cell” are used interchangeably herein. It is understood that such terms, as well as “cell”, “cell culture”, “cell line”, refer not only to the particular subject cell or cell line but also to the progeny or potential progeny of such a cell or cell line, without regard to the number of transfers. It should be understood that not all progeny are exactly identical to the parental cell. This is because certain modifications may occur in succeeding generations due to either mutation (e.g., deliberate or inadvertent mutations) or environmental influences, such progeny may not, in fact, be identical to the parent cell, but are still included within the scope of the term as used herein, so long as the progeny retain the same functionality as that of the originally cell or cell line.

[0054] The term “operably linked”,” as used herein, denotes a physical or functional linkage between two or more elements, e.g., polypeptide sequences or polynucleotide sequences, which permits them to operate in their intended fashion.

[0055] The term “percent identity,” as used herein in the context of two or more nucleic acids or proteins, refers to two or more sequences or subsequences that are the same or have a specified percentage of nucleotides or amino acids that are the same (e.g., about 60% sequence identity, 65%, 70%, 75%, 80%, 85%, 90%, 91%, 92%, 93%, 94%, 95%, 96%, 97%, 98%, 99%, or higher identity over a specified region, when compared and aligned for maximum correspondence over a comparison window or designated region) as measured using a BLAST or BLAST 2.0 sequence comparison algorithms with default parameters described below, or by manual alignment and visual inspection. See, e.g., the NCBI web site at ncbi.nlm.nih.gov/BLAST. Such sequences are then said to be “substantially identical.” This definition also refers to, or may be applied to, the complement of a test sequence. This definition also includes sequences that have deletions and/or additions, as well as those that have substitutions. Sequence identity can be calculated over a region that is at least about 20 amino acids or nucleotides in length, or over a region that is 10-100 amino acids or nucleotides in length, or over the entire length of a given sequence. Sequence identity can be calculated using published techniques and widely available computer programs, such as the GCS program package (Devereux et al, Nucleic Acids Res. 12:387, 1984), BLASTP, BLASTN, FASTA (Atschul et al., J Mol Biol 215:403, 1990). Sequence identity can be measured using sequence analysis software such as the Sequence Analysis Software Package of the Genetics Computer Group at the University of Wisconsin Biotechnology Center (1710 University Avenue, Madison, Wis. 53705), with the default parameters thereof

[0056] As used herein, and unless otherwise specified, a “therapeutically effective amount” of an agent is an amount sufficient to provide a therapeutic benefit in the treatment or management of a health condition, such as a disease (e.g., a cancer), or to delay or minimize one or more symptoms associated with the cancer. A therapeutically effective amount of a compound means an amount of therapeutic agent, alone or in combination with other therapeutic agents, which provides a therapeutic benefit in the treatment or management of the cancer. The term “therapeutically effective amount” can encompass an amount that improves overall therapy, reduces or avoids symptoms or causes of the cancer, or enhances the therapeutic efficacy of another therapeutic agent. An example of an “effective amount” is an amount sufficient to contribute to the treatment, prevention, or reduction of a symptom or symptoms of a disease, which could also be referred to as a “therapeutically effective amount.” A “reduction” of a symptom means decreasing of the severity or frequency of the symptom(s), or elimination of the symptom(s). The exact amount of a composition including a “therapeutically effective amount” will depend on the purpose of the treatment, and will be ascertainable by one skilled in the art using known techniques (see, e.g., Lieberman, Pharmaceutical Dosage Forms (vols. 1-3, 2010); Lloyd, The Art, Science and Technology of Pharmaceutical Compounding (2016); Pickar, Dosage Calculations (2012); and Remington: The Science and Practice of Pharmacy, 22nd Edition, 2012, Gennaro, Ed., Lippincott, Williams & Wilkins).

[0057] As used herein, a “subject” or an “individual” includes animals, such as human (e.g., human individuals) and non-human animals. In some embodiments, a “subject” or “individual” is an individual under the care of a physician. Thus, the subject can be a human individual or an individual who has, is at risk of having, or is suspected of having a disease of interest (e.g., cancer) and/or one or more symptoms of the disease. The subject can also be an individual who is diagnosed with a risk of the condition of interest at the time of diagnosis or later. The term “non-human animals” includes all vertebrates, e.g., mammals, e.g., rodents, e.g., mice, and non-mammals, such as non-human primates, e.g., sheep, dogs, cows, chickens, amphibians, reptiles, and the like.

[0058] Where a range of values is provided, it is understood that each intervening value, to the tenth of the unit of the lower limit unless the context clearly dictates otherwise, between the upper and lower limit of that range and any other stated or intervening value in that stated range, is encompassed within the disclosure. The upper and lower limits of these smaller ranges may independently be included in the smaller ranges, and are also encompassed within the disclosure, subject to any specifically excluded limit in the stated range. Where the stated range includes one or both of the limits, ranges excluding either or both of those included limits are also included in the disclosure.

[0059] All ranges disclosed herein also encompass any and all possible sub-ranges and combinations of sub-ranges thereof Any listed range can be recognized as sufficiently describing and enabling the same range being broken down into at least equal halves, thirds, quarters, fifths, tenths, and so forth. As a non-limiting example, each range discussed herein can be readily broken down into a lower third, middle third and upper third, and the like. As will also be understood by one skilled in the art all language such as “up to,” “at least,” “greater than,” “less than,” and the like include the number recited and refer to ranges which can be subsequently broken down into sub-ranges as discussed above. Finally, as will be understood by one skilled in the art, a range includes each individual member. Thus, for example, a group having 1-3 articles refers to groups having 1, 2, or 3 articles. Similarly, a group having 1-5 articles refers to groups having 1, 2, 3, 4, or 5 articles, and so forth.

[0060] It is appreciated that certain features of the disclosure, which are, for clarity, described in the context of separate embodiments, may also be provided in combination in a single embodiment. Conversely, various features of the disclosure, which are, for brevity, described in the context of a single embodiment, may also be provided separately or in any suitable sub-combination. All combinations of the embodiments pertaining to the disclosure are specifically embraced by the present disclosure and are disclosed herein just as if each and every combination was individually and explicitly disclosed. In addition, all sub-combinations of the various embodiments and elements thereof are also specifically embraced by the present disclosure and are disclosed herein just as if each and every such sub-combination was individually and explicitly disclosed herein.

[0061] One skilled in the art will understand that the chimeric receptors disclosed herein provide signals having a range of characteristics, from low to high ligand-induced transduction and (independently) low to moderate non-induced signal transduction. This range of activities is a new feature that can be exploited to enhance and tune the actions of engineered cells. Further, as described in greater detail below, a number of the receptor variants disclosed herein exhibit improved expression compared to existing SynNotch receptors.

### NOTCH RECEPTORS

[0062] Notch receptors are large transmembrane proteins that normally communicate signals upon binding to surface-bound ligands expressed on adjacent cells. Notch signals rely on cell-cell contact. Evolutionary divergence of vertebrates and invertebrates was accompanied by at least two rounds of gene duplication in the Notch lineage: flies possess a single Notch gene, worms two (GLP-1 and LIN-12), and mammals four (NOTCH1-4). Transduction of Notch signals relies on three key events: (i) ligand recognition; (ii) conformational exposure of the ligand-dependent cleavage site, and (iii) assembly of nuclear transcriptional activation complexes.

[0063] Canonical Notch signals are transduced by a process called regulated intramembrane proteolysis. Notch receptors are normally maintained in a resting, proteolytically resistant conformation on the cell surface, but ligand binding initiates a proteolytic cascade that releases the intracellular domain of the receptor (ICD) from the membrane. The critical, regulated cleavage step is effected by ADAM metalloproteases and occurs at a site called S2 immediately external to the plasma membrane. This truncated receptor, dubbed NEXT (for Notch extracellular truncation), remains membrane-tethered until it is processed at site S3 by γ-secretase, a multiprotein enzyme complex.

[0064] After γ-secretase cleavage, the ICD ultimately enters the nucleus, where it nucleates assembly of a transcriptional activation complex that contains a DNA-binding transcription factor, and a transcriptional coactivator of the Mastermind family. This complex then engages one or more additional coactivator proteins such as p300 to recruit the basal transcription machinery and activate the expression of downstream target genes.

[0065] Notch receptors have a modular domain organization. The ectodomains of Notch receptors consist of a series of N-terminal epidermal growth factor (EGF)-like repeats that are responsible for ligand binding. O-linked glycosylation of these EGF repeats, including modification by O-fucose, Fringe, and Rumi glycosyltransferases, also modulates the activity of Notch receptors in response to different ligand subtypes in flies and mammals.

[0066] The EGF repeats are followed by three LIN-12/Notch repeat (LNR) modules, which are unique to Notch receptors, and are widely reported to participate in preventing premature receptor activation. The heterodimerization (HD) domain of Notch1 is divided by furin cleavage, so that its N-terminal part terminates the extracellular subunit, and its C-terminal half constitutes the beginning of the transmembrane subunit. Following the extracellular region, the receptor has a transmembrane segment and an intracellular domain (ICD), which includes a transcriptional regulator.

### COMPOSITIONS OF THE DISCLOSURE

[0067] The receptors of the disclosure provide a range of sensitivity, including a receptor that, when expressed in a T cell, exhibits a higher ligand-induced signal when the T cell is activated. Additionally, by omitting the Notch/SynNotch regulatory regions, some polynucleotides encoding the receptors of the disclosure can be made smaller than SynNotch-encoding polynucleotides, which enables the use of vectors having more limited capacity, or the inclusion of additional elements that would otherwise be excluded due to vector capacity-related size constraints.

[0068] As described in greater detail below, several chimeric polypeptide receptors disclosed herein have improved signal transduction compared to existing SynNotch receptors and provide a more modular platform for engineering. Improved signal transduction can take the form of higher stimulated (ligand-induced) transduction, reduced baseline (non- stimulated) transduction, and higher ratios of stimulated to baseline transduction. Signal transduction can be measured based on the expression of a reporter gene or other signal. Existing SynNotch receptors can be engineered with ligand-binding domains such scFvs and nanobodies, but it has been difficult to use natural extracellular domains from other receptors or ligands on SynNotch receptors. In contrast, the second-generation Notch receptors disclosed herein work well with extracellular ligand binding domains comprising non-antibody derived ligand binding domains, thus expanding the landscape of targetable diseases and tissues.

[0069] As described in Example 3 and FIGS. 2 and 3, chimeric polypeptide receptors have been tested and validated in primary human T cells. Without being bound to any particular theory, it is contemplated that these new receptors show similar performance in mouse models. The receptors disclosed herein may be engineered into various immune cell types for enhanced discrimination and elimination of tumors, or in engineered cells for control of autoimmunity and tissue regeneration. Accordingly, engineered cells, such as immune cells engineered to express one of more of the chimeric receptors disclosed herein, are also within the scope of the disclosure.

### Chimeric Polypeptides

[0070] This disclosure provides novel, non-naturally occurring recombinant chimeric polypeptides engineered to modulate transcriptional regulation in a ligand-dependent manner. In some embodiments, the receptors disclosed herein bind a target cell-surface displayed ligand, which triggers proteolytic cleavage of the receptors and release of a transcriptional regulator that modulates a custom transcriptional program in the cell.

[0071] In some embodiments, provided herein is a chimeric polypeptide including, from N-terminus to C-terminus (a) an extracellular ligand-binding domain (ECD) having a binding affinity for a selected ligand; (b) a linking polypeptide; (c) a transmembrane domain (TMD) including one or more ligand-inducible proteolytic cleavage sites; (d) a stop-transfer sequence (STS); and (e) an intracellular domain (ICD) including a transcriptional regulator, wherein binding of the selected ligand to the extracellular ligand-binding domain induces cleavage at one or more ligand-inducible proteolytic cleavage sites between the transcriptional regulator and the linking polypeptide, and wherein the STS is heterologous to the TMD. In some embodiments, the linking polypeptide has substantial sequence identity to the JMD of Notch1, Notch2, Notch3, and/or Notch4. In some embodiments, the linking polypeptide has substantial sequence identity to the Notch1, Notch2, Notch3, and/or Notch4 JMD, but does not include a LIN-12-Notch repeat (LNR) and/or a heterodimerization domain (HD) of a Notch receptor. In some embodiments, the linking polypeptide does not have substantial sequence identity to the Notch1, Notch2, Notch3, and/or Notch4 JMD. In some embodiments, the linking polypeptide includes an oligimerization domain which promotes formation of dimers, trimers, or higher order assemblages of the receptor.

[0072] In some embodiments, the STS is selected from the STS sequence in APLP1, APLP2, APP, TGBR3, CSF1R, CXCL16, CX3CL1, DAG1, DCC, DNER, DSG2, CDH1, GHR, HLA-A, IFNAR2, IGF1R, IL1R1, ERN2, KCNE1, KCNE2, CHL1, LRP1, LRP2, PTPRF, SCN1B, SCN3B, NPR3, NGFR, PLXDC2, PAM, AGER, ROBO1, SORCS3, SORCS1, SORL1, SDC1, SDC2, SPN, TYR, TYRP1, DCT, VASN, FLT1, CDH5, PKHD1, NECTIN1, KL, IL6R, EFNB1, CD44, CLSTN1, LRP8, PCDHGC3, NRG1, LRP1B, JAG2, EFNB2, DLL1, CLSTN2, EPCAM, ErbB4, KCNE3, CDH2, NRG2, PTPRK, BTC, EPHA4, IL1R2, KCNE4, SCN2B, Nradd, PTPRM, Notch1, Notch2, Notch3, or Notch4. In some embodiments, the STS is selected from the STS sequence in DAG1, PTPRF, CDH5, KL, LRP1B, JAG2, KCNE3, NRG2, PTPRK, EPHA4, PTPRM, NOTCH1, NOTCH2, NOTCH3, NOTCH4, CXCL16, or NRG1.

### Extracellular Domains (ECD)

[0073] In some embodiments, the (ECD) of the chimeric polypeptides receptors disclosed herein has a binding affinity for one or more target ligands. The target ligand is expressed on a cell surface, or is otherwise immobilized or restrained to the extent that it can exert a mechanical force on the chimeric receptor. For example, an otherwise soluble ligand may be targeted if it is bound to a surface, or to a molecule in the extracellular matrix. In some embodiments, the target ligand is a cell-surface ligand. Non-limiting examples of suitable ligands include cell surface receptors; adhesion proteins; carbohydrates, lipids, glycolipids, lipoproteins, and lipopolysaccharides that are surface-bound; integrins; mucins; and lectins. In some embodiments, the ligand is a protein. In some embodiments, the ligand is a carbohydrate. In some embodiments, the ligand is a cluster of differentiation (CD) marker. In some embodiments, the CD marker is selected from the group consisting of CD1, CD1a, CD1b, CD1c, CD1d, CD1e, CD2, CD3d, CD3e, CD3g, CD4, CD5, CD7, CD8a, CD8b, CD19, CD20, CD21, CD22, CD23, CD25, CD27, CD28, CD33, CD34, CD40, CD45, CD48, CD52, CD59, CD66, CD70, CD71, CD72, CD73, CD79A, CD79B, CD80 (B7.1), CD86 (B7.2), CD94, CD95, CD134, CD140 (PDGFR4), CD152, CD154, CD158, CD178, CD181 (CXCR1), CD182 (CXCR2), CD183 (CXCR3), CD210, CD246, CD252, CD253, CD261, CD262, CD273 (PD-L2), CD274 (PD-L1), CD276 (B7H3), CD279, CD295, CD339 (JAG1), CD340 (HER2), EGFR, FGFR2, CEA, AFP, CA125, MUC-1, and MAGE.

[0074] In some embodiments, the extracellular domain includes the ligand-binding portion of a receptor. In some embodiments, the extracellular domain includes an antigen-binding moiety that binds to one or more target antigens. In some embodiments, the antigen-binding moiety includes one or more antigen-binding determinants of an antibody or a functional antigen-binding fragment thereof In some embodiments, the antigen-binding moiety is selected from the group consisting of an antibody, a nanobody, a diabody, a triabody, or a minibody, a F(ab′)₂ fragment, a Fab fragment, a single chain variable fragment (scFv), and a single domain antibody (sdAb), or a functional fragment thereof In some embodiments, the antigen-binding moiety includes an scFv.

[0075] The antigen-binding moiety can include naturally-occurring amino acid sequences or can be engineered, designed, or modified so as to provide desired and/or improved properties, e.g., increased binding affinity. Generally, the binding affinity of an antigen-binding moiety, e.g., an antibody, for a target antigen (e.g., CD19 protein) can be calculated by the Scatchard method described by Frankel et al., Mol Immunol (1979) 16:101-06. In some embodiments, binding affinity is measured by an antigen/antibody dissociation rate. In some embodiments, binding affinity is measured by a competition radioimmunoassay. In some embodiments, binding affinity is measured by ELISA. In some embodiments, antibody affinity is measured by flow cytometry. An antibody that “selectively binds” an antigen (such as CD19) is an antigen-binding moiety that binds the antigen with high affinity and does not significantly bind other unrelated antigens.

[0076] A skilled artisan can select an extracellular domain based on the desired localization or function of a cell that is genetically modified to express an engineered receptor of the present disclosure. For example, an extracellular domain comprising an antibody specific for an estrogen receptor can target cells to estrogen-dependent breast cancer cells. In some embodiments, the extracellular domain of the disclosed engineered receptors is capable of binding a tumor associated-antigen (TAA) or a tumor-specific antigen (TSA). A skilled artisan in the art will understand that TAAs comprise molecules, e.g., proteins, present on tumor cells and on some fraction of normal cells, or on many normal cells but at much lower concentration than on tumor cells. Examples include, without limitation, CEA, AFP, HER2, CTAG1B and MAGEA1. In contrast, TSAs comprise molecules, e.g., proteins, present on tumor cells but absent from normal cells. Examples include, without limitation, oncoviral antigens and mutated proteins (also known as neoantigens).

[0077] In some cases, the antigen-binding moiety is specific for an epitope present in an antigen that is expressed by a tumor cell, i.e., a TSA or a TAA. The TSA or TAA can be an antigen associated with, e.g., a breast cancer cell, a B cell lymphoma, a pancreatic cancer, a Hodgkin lymphoma cell, an ovarian cancer cell, a prostate cancer cell, a mesothelioma, a lung cancer cell, a non-Hodgkin B-cell lymphoma (B-NHL) cell, an ovarian cancer cell, a prostate cancer cell, a mesothelioma cell, a melanoma cell, a chronic lymphocytic leukemia cell, an acute lymphocytic leukemia cell, a neuroblastoma cell, a glioma, a glioblastoma, a colorectal cancer cell, and the like. It will also be understood that a tumor-associated antigen may also be expressed by a non-cancerous cell. In some embodiments, the antigen-binding domain is specific for an epitope present in a tissue-specific antigen. In some embodiments, the antigen-binding domain is specific for an epitope present in a disease-associated antigen.

[0078] Non-limiting examples of suitable target antigens include CD19, B7H3 (CD276), BCMA (CD269), alkaline phosphatase, placental-like 2 (ALPPL2), green fluorescent protein (GFP), enhanced green fluorescent protein (EGFP), signal regulatory protein α (SIRPα), CD123, CD171, CD179a, CD20, CD213A2, CD22, CD24, CD246, CD272, CD30, CD33, CD38, CD44v6, CD46, CD71, CD97, CEA, CLDN6, CLECL1, CS-1, EGFR, EGFRvIII, ELF2M, EpCAM, EphA2, Ephrin B2, FAP, FLT3, GD2, GD3, GM3, GPRC5D, HER2 (ERBB2/neu), IGLL1, IL-11Ra, KIT (CD117), MUC1, NCAM, PAP, PDGFR-β, PRSS21, PSCA, PSMA, ROR1, SSEA-4, TAG72, TEM1CD248, TEM7R, TSHR, VEGFR2, ALPI, citrullinated vimentin, cMet, and Axl.

[0079] In some embodiments, the target antigen is selected from CD19, B7H3 (CD276), BCMA (CD269), CD123, CD171, CD179a, CD20, CD213A2, CD22, CD24, CD246, CD272, CD30, CD33, CD38, CD44v6, CD46, CD71, CD97, CEA, CLDN6, CLECL1, CS-1, EGFR, EGFRvIII, ELF2M, EpCAM, EphA2, Ephrin B2, FAP, FLT3, GD2, GD3, GM3, GPRC5D, HER2 (ERBB2/neu), IGLL1, IL-11Ra, KIT (CD117), MUC1, NCAM, PAP, PDGFR-β, PRSS21, PSCA, PSMA, ROR1, SSEA-4, TAG72, TEM1/CD248, TEM7R, TSHR, VEGFR2, ALPI, citrullinated vimentin, cMet, Axl, GPC2, human epidermal growth factor receptor 2 (Her2/neu), CD276 (B7-H3), IL-13Rα1, IL-13Rα2, alphα-fetoprotein (AFP), carcinoembryonic antigen (CEA), cancer antigen-125 (CA-125), CA19-9, calretinin, MUC-1, epithelial membrane protein (EMA), epithelial tumor antigen (ETA), tyrosinase, melanoma-associated antigen (MAGE), CD34, CD45, CD123, CD93, CD99, CD117, chromogranin, cytokeratin, desmin, glial fibrillary acidic protein (GFAP), gross cystic disease fluid protein (GCDFP-15), ALK, DLK1, FAP, NY-ESO, WT1, HMB-45 antigen, protein melan-A (melanoma antigen recognized by T lymphocytes; MART-1), myo-D1, muscle-specific actin (MSA), neurofilament, neuron-specific enolase (NSE), placental alkaline phosphatase, synaptophysin, thyroglobulin, thyroid transcription factor-1, AOC3 (VAP-1), CAM-3001, CCL11 (eotaxin-1), CD125, CD147 (basigin), CD154 (CD40L), CD2, CD20, CD23 (IgE receptor), CD25 (a chain of IL-2 receptor), CD3, CD4, CD5, IFN-α, IFN-γ, IgE, IgE Fc region, IL-1, IL-12, IL-23, IL-13, IL-17, IL-17A, IL-22, IL-4, IL-5, IL-5, IL-6, IL-6 receptor, integrin α4, integrin α4β7, LFA-1 (CD11α), myostatin, OX-40, scleroscin, SOST, TGFβ1, TNF-α, VEGF-A, pyruvate kinase isoenzyme type M2 (tumor M2-PK), CD20, CD5, CD7, CD3, TRBC1, TRBC2, CD38, CD123, CD93, CD34, CD1a, SLAMF7/CS1, FLT3, CD33, CD123, TALLA-1, CSPG4, DLL3, Kappa light chain, Lamba light chain, CD16/ FcγRIII, CD64, FITC, CD22, CD27, CD30, CD70, GD2 (ganglioside G2), GD3, EGFRvIII (epidermal growth factor variant III), EGFR and isovariants thereof, TEM-8, sperm protein 17 (Sp17), mesothelin.

[0080] Further non-limiting examples of suitable antigens include PAP (prostatic acid phosphatase), prostate stem cell antigen (PSCA), prostein, NKG2D, TARP (T cell receptor γ alternate reading frame protein), Trp-p8, STEAP1 (six-transmembrane epithelial antigen of the prostate 1), an abnormal ras protein, an abnormal p53 protein, integrin β3 (CD61), galactin, K-Ras (V-Ki-ras2 Kirsten rat sarcoma viral oncogene), Ral-B, GPC2, CD276 (B7-H3), or IL-13Rα. In some embodiments, the antigen is ALPPL2. In some embodiments, the antigen is BCMA. In some embodiments, the antigen-binding moiety of the ECD is specific for a reporter protein, such as GFP and eGFP. Non-limiting examples of such antigen binding moiety include a LaG17 anti-GFP nanobody. In some embodiments, the antigen-binding moiety of the ECD includes an anti-BCMA fully-humanized VH domain (FHVH). In some embodiments, the antigen is signal regulatory protein α (SIRPα).

[0081] Additional antigens that can be suitable for the chimeric polypeptide receptors disclosed herein include, but are not limited to GPC2, human epidermal growth factor receptor 2 (Her2/neu), CD276 (B7-H3), IL-13Rα1, IL-13Rα2, α-fetoprotein (AFP), carcinoembryonic antigen (CEA), cancer antigen-125 (CA-125), CA19-9, calretinin, MUC-1, epithelial membrane protein (EMA), epithelial tumor antigen (ETA). Other suitable target antigens include, but are not limited to, tyrosinase, melanoma-associated antigen (MAGE), CD34, CD45, CD123, CD93, CD99, CD117, chromogranin, cytokeratin, desmin, glial fibrillary acidic protein (GFAP), gross cystic disease fluid protein (GCDFP-15), ALK, DLK1, FAP, NY-ESO, WT1, HMB-45 antigen, protein melan-A (melanoma antigen recognized by T lymphocytes; MART-1), myo-D1, muscle-specific actin (MSA), neurofilament, neuron-specific enolase (NSE), placental alkaline phosphatase, synaptophysin, thyroglobulin, thyroid transcription factor-1.

[0082] Additional suitable antigens include, but are not limited to, those associated with an inflammatory disease such as, AOC3 (VAP-1), CAM-3001, CCL11 (eotaxin-1), CD125, CD147 (basigin), CD154 (CD40L), CD2, CD20, CD23 (IgE receptor), CD25 (a chain of IL-2 receptor), CD3, CD4, CD5, IFN-α, IFN-γ, IgE, IgE Fc region, IL-1, IL-12, IL-23, IL-13, IL-17, IL-17A, IL-22, IL-4, IL-5, IL-5, IL-6, IL-6 receptor, integrin α4, integrin α4β7, LFA-1 (CD11a), myostatin, OX-40, scleroscin, SOST, TGFβ1, TNFα, and VEGF-A.

[0083] Further antigens suitable for the chimeric receptors disclosed herein include, but are not limited to the pyruvate kinase isoenzyme type M2 (tumor M2-PK), CD20, CD5, CD7, CD3, TRBC1, TRBC2, BCMA, CD38, CD123, CD93, CD34, CD1a, SLAMF7/CS1, FLT3, CD33, CD123, TALLA-1, CSPG4, DLL3, Kappa light chain, Lamba light chain, CD16/FcγRIII, CD64, FITC, CD22, CD27, CD30, CD70, GD2 (ganglioside G2), GD3, EGFRvIII (epidermal growth factor variant III), EGFR and isovariants thereof, TEM-8, sperm protein 17 (Sp17), mesothelin. Further non-limiting examples of suitable antigens include PAP (prostatic acid phosphatase), prostate stem cell antigen (PSCA), prostein, NKG2D, TARP (T cell receptor y alternate reading frame protein), Trp-p8, STEAP1 (six-transmembrane epithelial antigen of the prostate 1), an abnormal ras protein, an abnormal p53 protein, integrin β3 (CD61), galactin, K-Ras (V-Ki-ras2 Kirsten rat sarcoma viral oncogene), and Ral-B. In some embodiments, the antigen is GPC2, CD19, Her2/neu, CD276 (B7-H3), IL-13Rα1, or IL-13Rα2. In some embodiments, the antigen is ALPPL2. In some embodiments, the antigen is BCMA. In some embodiments, the antigen-binding moiety of the ECD is specific for a reporter protein, such as GFP and eGFP. Non-limiting examples of such antigen-binding moiety include a LaG17 anti-GFP nanobody. In some embodiments, the antigen-binding moiety of the ECD includes an anti-BCMA fully humanized VH domain (FHVH).

[0084] In some embodiments, antigens suitable for targeting by the chimeric polypeptides and chimeric receptors disclosed herein include ligands derived from a pathogen. For example, the antigen can be HER2 produced by HER2-positive breast cancer cells. In some embodiments, the antigen can be CD19 that is expressed on B-cell leukemia. In some embodiments, the antigen can be EGFR that is expressed on glioblastoma multiform (GBM) but much less expressed so on healthy CNS tissue. In some embodiments, the antigen can be CEA that is associated with cancer in adults, for example colon cancer.

[0085] In some embodiments, the antigen-binding moiety of the extracellular domain is specific for a cell surface target, where non-limiting examples of cell surface targets include CD19, CD30, Her2, CD22, ENPP3, EGFR, CD20, CD52, CD11α, and α-integrin. In some embodiments, the chimeric receptors disclosed herein include an extracellular domain having an antigen-binding moiety that binds CD19, CEA, HER2, MUC1, CD20, or EGFR. In some embodiments, the chimeric receptors disclosed herein include an extracellular domain including an antigen-binding moiety that binds CD19. In some embodiments, the antigen- binding moiety includes an amino acid sequence having at least 70%, at least 75%, at least 80%, at least 85%, at least 90%, at least 95%, at least 96%, at least 97%, at least 98%, at least 99% sequence identity to SEQ ID NO: 199 in the Sequence Listing. In some embodiments, the antigen-binding moiety includes an amino acid sequence having at least 90% sequence identity to SEQ ID NO: 199. In some embodiments, the antigen-binding moiety includes an amino acid sequence having at least 95% sequence identity to SEQ ID NO: 199. In some embodiments, the antigen-binding moiety includes an amino acid sequence having 100% sequence identity to SEQ ID NO: 199. In some embodiments, the antigen-binding moiety includes an amino acid sequence having a sequence of SEQ ID NO: 199, wherein one, two, three, four, or five of the amino acid residues in SEQ ID NO: 199 is/are substituted by a different amino acid residue.

### Linking Polypeptide

[0086] The ECD and the TMD are linked to each other with a linking polypeptide. “SynNotch” receptors comprise a heterologous extracellular ligand-binding domain, a linking polypeptide having substantial sequence identity with a Notch receptor JMD (including the NRR), a TMD, and an ICD. “Fn Notch” receptors comprise a heterologous extracellular ligand binding domain, a linking polypeptide having substantial sequence identity with a Robo receptor (such as a mammalian Robo1, Robo2, Robo3, or Robo4), followed by 1, 2, or 3 fibronectin repeats (“Fn”), a TMD, and an ICD. “Mini Notch” receptors comprise a heterologous extracellular ligand binding domain, a linking polypeptide having substantial sequence identity with a Notch receptor JMD but lacking the NRR (the LIN-12-Notch repeat (LNR) modules, and the heterodimerization domain), a TMD, and an ICD. “Minimal Linker Notch” receptors comprise a heterologous extracellular ligand-binding domain, a linking polypeptide lacking substantial sequence identity with a Notch receptor (for example, without limitation, having a synthetic (GGS)ₙ polypeptide sequence), a TMD, and an ICD. “Hinge Notch” receptors comprise a heterologous extracellular ligand-binding domain, a hinge sequence comprising an oligomerization domain (i.e., a domain that promotes dimerization, trimerization, or higher order multimerization with a synthetic receptor and/or an existing host receptor), a TMD, and an ICD.

[0087] In the Mini Notch receptor, the linking polypeptide is derived from a Notch JMD sequence after deletion of the NRR and HD domain. The Notch JMD sequence may be the sequence from Notch1, Notch2, Notch3, or Notch4, and can be derived from a non-human homolog, such as those from Drosophila, Gallus, Danio, and the like. Four to 50 amino acid residues of the remaining Notch sequence (e.g., 4, 5, 6, 7, 8, 9, 10, 11, 12, 13, 14, 15, 16, 17, 18, 19, 20, or more, amino acid residues) can be used as a polypeptide linker. In some embodiments, the length and amino acid composition of the linker polypeptide sequence are varied to alter the orientation and/or proximity of the ECD and the TMD relative to one another to achieve a desired activity of the chimeric polypeptide, such as the signal transduction level when ligand induced or in the absence of ligand. In some embodiments, the linker polypeptide sequence includes a sequence having at least 80% sequence identity, such as, at least 80%, at least 85%, at least 90%, at least 95%, at least 96%, at least 97%, at least 98%, or 99% sequence identity to a sequence selected from the group consisting of SEQ ID NOS: 23-33 in the Sequence Listing. In some embodiments, the linker polypeptide sequence includes an amino acid sequence having at least 90% sequence identity to a sequence selected from the group consisting of SEQ ID NOS: 23-33. In some embodiments, the linker polypeptide sequence includes an amino acid sequence having at least 95% sequence identity to a sequence selected from the group consisting of SEQ ID NOS: 23-33. In some embodiments, the linker polypeptide sequence includes an amino acid sequence having at least 100% sequence identity to a sequence selected from the group consisting of SEQ ID NOS: 23-33. In some embodiments, the linker polypeptide sequence includes an amino acid sequence having a sequence selected from the group consisting of SEQ ID NOS: 23-33, wherein one, two, three, four, or five of the amino acid residues in any one of the SEQ ID NOS: 23-33 is/are substituted by a different amino acid residue.

[0088] In the Minimal Linker Notch receptor, the linking polypeptide does not have substantial sequence identity to a Notch JMD sequence, including the Notch JMD sequence from Notch1, Notch2, Notch3, or Notch4, or a non-human homolog thereof. Four to 50 amino acid residues (e.g., 4, 5, 6, 7, 8, 9, 10, 11, 12, 13, 14, 15, 16, 17, 18, 19, 20, or more, amino acid residues) can be used as a polypeptide linker. In some embodiments, the length and amino acid composition of the linker polypeptide sequence are varied to alter the orientation and/or proximity of the ECD and the TMD relative to one another to achieve a desired activity of the chimeric polypeptide of the disclosure. In some embodiments, the linker polypeptide includes a sequence having less than 80% sequence identity, such as, less than 80%, less than 75%, less than 70%, less than 65%, less than 60% sequence identity to a sequence selected from the group consisting of SEQ ID NOS: 23-33 in the Sequence Listing. In some embodiments, the linker polypeptide sequence includes an amino acid sequence having less than 90% sequence identity to a sequence selected from the group consisting of SEQ ID NOS: 23-33. In some embodiments, the linker polypeptide sequence includes an amino acid sequence having less than 95% sequence identity to a sequence selected from the group consisting of SEQ ID NOS: 23-33. In some embodiments, the linker polypeptide sequence includes an amino acid sequence having less than 100% sequence identity to a sequence selected from the group consisting of SEQ ID NOS: 23-33. The Minimal Linker sequence can be designed to include or omit a protease cleavage site, and can include or omit a glycosylation site or sites for other types of post-translational modification. In some embodiments, the Minimal Linker linker does not comprise a protease cleavage site or a glysosylation site.

[0089] Hinge linkers of the disclosure include an oligomerization domain (e.g., a hinge domain) containing one or more polypeptide motifs that promote oligomer formation of the chimeric polypeptides via intermolecular disulfide bonding. In these instances, within the chimeric Notch receptors disclosed herein, the hinge domain generally includes a flexible polypeptide connector region disposed between the ECD and the TMD. Thus, the hinge domain provides flexibility between the ECD and TMD and also provides sites for intermolecular disulfide bonding between two or more chimeric polypeptide monomers to form an oligomeric complex. In some embodiments, the hinge domain includes motifs that promote dimer formation of the chimeric polypeptides disclosed herein. In some embodiments, the hinge domain includes motifs that promote trimer formation of the chimeric polypeptides disclosed herein (e.g., a hinge domain derived from OX40). Hinge polypeptide sequences suitable for the compositions and methods of the disclosure can be naturally-occurring hinge polypeptide sequences (e.g., those from naturally-occurring immunoglobulins) or can be engineered, designed, or modified so as to provide desired and/or improved properties, e.g., modulating transcription. Suitable hinge polypeptide sequences include, but are not limited to, those derived from IgA, IgD, and IgG subclasses, such as IgG1 hinge domain, IgG2 hinge domain, IgG3 hinge domain, and IgG4 hinge domain, or a functional variant thereof In some embodiments, the hinge polypeptide sequence contains one or more CXXC motifs. In some embodiments, the hinge polypeptide sequence contains one or more CPPC motifs. Additional information in this regard can be found in, for example, a recent review by G. Vidarsson et al., Frontiers Immunol (2014) 5:520 (doi: 10.3389/fimmu.2014.00520), which is hereby incorporated by reference in its entirety.

[0090] Hinge polypeptide sequences can also be derived from a CD8α hinge domain, a CD28 hinge domain, a CD152 hinge domain, a PD-1 hinge domain, a CTLA4 hinge domain, an OX40 hinge domain, and functional variants thereof In some embodiments, the hinge domain includes a hinge polypeptide sequence derived from a CD8a hinge domain or a functional variant thereof. In some embodiments, the hinge domain includes a hinge polypeptide sequence derived from a CD28 hinge domain or a functional variant thereof In some embodiments, the hinge domain includes a hinge polypeptide sequence derived from an OX40 hinge domain or a functional variant thereof. In some embodiments, the hinge domain includes a hinge polypeptide sequence derived from an IgG4 hinge domain or a functional variant thereof.

[0091] The Hinge linker can include about 5 to about 60 amino acids from or overlapping with the selected hinge domain, for example at least about 5, at least about 6, at least about 7, at least about 8, at least about 9, at least about 10, at least about 12, at least about 15, at least about 17, at least about 20, at least about 22, at least about 24, at least about 26, at least about 28, at least about 30, at least about 35, at least about 40, at least about 45, at least about 50, at least about 55, or , at least about 60 amino acids. In embodiments of the invention, the Hinge linker has no more than about 60 amino acids, less than about 55, less than about 50, less than about 45, less than about 40, less than about 35, less than about 32, less than about 30, less than about 29, less than about 28, less than about 27, less than about 26, less than about 25, less than about 24, less than about 23, less than about 22, less than about 21, less than about 20, less than about 18, less than about 16, less than about 14, less than about 12, or less than about 10 amino acids.

[0092] The Fn Notch linking polypeptide is derived from the Robol JMD, which contains a fibronectin repeat (Fn) domain, with a short polypeptide sequence between the Fn repeats and the TMD. The Fn Notch linking polypeptide does not contain a Notch negative regulatory region (NRR), or the Notch HD domain. The Fn linking polypeptide can contain 1, 2, 3, 4, or 5 Fn repeats. In some embodiments, the chimeric receptor comprises a Fn linking polypeptide having about 1 to about 5 Fn repeats, about 1 to about 3 Fn repeats, or about 2 to about 3 Fn repeats. The short polypeptide sequence between the Fn repeats and the TMD can be from about 2 to about 30 amino acid residues (e.g., 2, 3, 4, 5, 6, 7, 8, 9, 10, 11, 12, 13, 14, 15, 16, 17, 18, 19, 20, or more, amino acid residues). In some embodiments, the short polypeptide sequence can be between about 5 and about 20 amino acids, of any sequence. In some embodiments, the short polypeptide sequence can be between about 5 and about 20 naturally-occurring amino acids, of any sequence. In some embodiments, the short polypeptide sequence can be between about 5 and about 20 amino acids, of any sequence but having no more than one proline. In some embodiments, the short polypeptide sequence can be between about 5 and about 20 amino acids, and about 50% or more of the amino acids are glycine. In some embodiments, the short polypeptide sequence can be between about 5 and about 20 amino acids, where the amino acids are selected from glycine, serine, threonine, and alanine. In some embodiments, the length and amino acid composition of the Fn linking polypeptide sequence can be varied to alter the orientation and/or proximity of the ECD and the TMD relative to one another to achieve a desired activity of the chimeric polypeptide of the disclosure. In some embodiments, the JMD polypeptide sequence includes a sequence having at least 80% sequence identity, such as, at least 80%, at least 85%, at least 90%, at least 95%, at least 96%, at least 97%, at least 98%, or 99% sequence identity to a sequence selected from the group consisting of SEQ ID NOS: 9-11 in the Sequence Listing. In some embodiments, the JMD polypeptide sequence includes an amino acid sequence having at least 90% sequence identity to a sequence selected from the group consisting of SEQ ID NOS: 9-11. In some embodiments, the Fn linker polypeptide sequence includes an amino acid sequence having at least 95% sequence identity to a sequence selected from the group consisting of SEQ ID NOS: 9-11. In some embodiments, the Fn linker polypeptide sequence includes an amino acid sequence having about 100% sequence identity to a sequence selected from the group consisting of SEQ ID NOS: 9-11. In some embodiments, the Fn linker polypeptide sequence includes an amino acid sequence having a sequence selected from the group consisting of SEQ ID NOS: 9-11, wherein one, two, three, four, or five of the amino acid residues in any one of the SEQ ID NOS: 9-11 is/are substituted by a different amino acid residue.

### Transmembrane Domains

[0093] As described above, the chimeric polypeptides of the disclosure include a TMD comprising one or more ligand-inducible proteolytic cleavage sites.

[0094] Examples of proteolytic cleavage sites in a Notch receptor (e.g., S2 or S3) are as described above. Additional proteolytic cleavage sites suitable for the compositions and methods disclosed herein include, but are not limited to, a metalloproteinase cleavage site for a MMP selected from collagenase-1, -2, and -3 (MMP-1, - 8, and -13), gelatinase A and B (MMP-2 and -9), stromelysin 1, 2, and 3 (MMP-3, -10, and -11), matrilysin (MMP-7), and membrane metalloproteinases (MT1-MMP and MT2-MMP). For example, the cleavage sequence of MMP-9 is Pro-X-X-Hy (wherein, X represents an arbitrary residue; Hy, a hydrophobic residue such as Leu, Ile, Val, Phe, Trp, Tyr, Val, Met, and Pro) (SEQ ID NO: 211), e.g., Pro-X-X-Hy-(Ser/Thr) (SEQ ID NO: 212), e.g., Pro-Leu/Gln-Gly-Met-Thr-Ser (SEQ ID NO: 213) or Pro-Leu/Gln-Gly-Met-Thr (SEQ ID NO: 214). Another example of a suitable protease cleavage site is a plasminogen activator cleavage site, e.g., a urokinase plasminogen activator (uPA) or a tissue plasminogen activator (tPA) cleavage site. Another example of a suitable protease cleavage site is a prolactin cleavage site. Specific examples of cleavage sequences of uPA and tPA include sequences comprising Val-Gly-Arg (SEQ ID NO: 215). Another example of a protease cleavage site that can be included in a proteolytically cleavable linker is a tobacco etch virus (TEV) protease cleavage site, e.g., Glu-Asn-Leu-Tyr-Thr-Gln-Ser (SEQ ID NO: 216), where the protease cleaves between the glutamine and the serine. Another example of a protease cleavage site that can be included in a proteolytically cleavable linker is an enterokinase cleavage site, e.g., Asp-Asp-Asp-Asp-Lys (SEQ ID NO: 217), where cleavage occurs after the lysine residue. Another example of a protease cleavage site that can be included in a proteolytically cleavable linker is a thrombin cleavage site, e.g., Leu-Val-Pro-Arg (SEQ ID NO: 218). Additional suitable linkers comprising protease cleavage sites include sequences cleavable by the following proteases: a PreScission™ protease (a fusion protein comprising human rhinovirus 3C protease and glutathione-S-transferase), a thrombin, cathepsin B, Epstein-Barr virus proteas, MMP-3 (stromelysin), MMP-7 (matrilysin), MMP-9; thermolysin-like MMP, matrix metalloproteinase 2 (MMP-2), cathepsin L; cathepsin D, matrix metalloproteinase 1 (MMP-1), urokinase-type plasminogen activator, membrane type 1 matrixmetalloprotemase (MT-MMP), stromelysin 3 (or MMP-11), thermolysin, fibroblast collagenase and stromelysin-1, matrix metalloproteinase 13 (collagenase-3), tissue-type plasminogen activator(tPA), human prostate-specific antigen, kallikrein (hK3), neutrophil elastase, and calpain (calcium activated neutral protease). Proteases that are not native to the host cell in which the receptor is expressed (for example, TEV) can be used as a further regulatory mechanism, in which activation of the receptor is reduced until the protease is expressed or otherwise provided. Additionally, a protease may be tumor-associated or disease-associated (expressed to a significantly higher degree than in normal tissue), and serve as an independent regulatory mechanism. For example, some matrix metalloproteases are highly expressed in certain cancer types.

[0095] Generally, the TMD suitable for the chimeric receptors disclosed herein can be any transmembrane domain of a Type 1 transmembrane receptor including at least one γ-secretase cleavage site. Detailed description of the structure and function of the γ-secretase complex as well as its substrate proteins, including amyloid precursor protein (APP) and Notch, can, for example, be found in a recent review by Zhang et al., Frontiers Cell Neurosci (2014). Non-limiting suitable TMDs from Type 1 transmembrane receptors include those from CLSTN1, CLSTN2, APLP1, APLP2, LRP8, APP, BTC, TGBR3, SPN, CD44, CSF1R, CXCL16, CX3CL1, DCC, DLL1, DSG2, DAG1, CDH1, EPCAM, EPHA4, EPHB2, EFNB1, EFNB2, ErbB4, GHR, HLA-A, and IFNAR2, wherein the TMD includes at least one γ-secretase cleavage site. Additional TMDs suitable for the compositions and methods described herein include, but are not limited to, transmembrane domains from Type 1 transmembrane receptors IL1R1, IL1R2, IL6R, INSR, ERN1, ERN2, JAG2, KCNE1, KCNE2, KCNE3, KCNE4, KL, CHL1, PTPRF, SCN1B, SCN3B, NPR3, NGFR, PLXDC2, PAM, AGER, ROBO1, SORCS3, SORCS1, SORL1, SDC1, SDC2, SPN, TYR, TYRP1, DCT, VASN, FLT1, CDH5, PKHD1, NECTIN1, PCDHGC3, NRG1, LRP1B, CDH2, NRG2, PTPRK, SCN2B, Nradd, and PTPRM. In some embodiments, the TMD of the chimeric polypeptides or Notch receptors of the disclosure is a TMD derived from the TMD of a member of the calsyntenin family, such as, alcadein alpha and alcadein gamma In some embodiments, the TMD of the chimeric polypeptides or Notch receptors of the disclosure is a TMD known for Notch receptors. In some embodiments, the TMD of the chimeric polypeptides or Notch receptors of the disclosure is a TMD derived from a different Notch receptor. For example, in a Mini Notch based on human Notch1, the Notch1 TMD can be substituted with a Notch2 TMD, Notch3 TMD, Notch4 TMD, or a Notch TMD from a non-human animal such as Danio rerio, Drosophila melanogaster, Xenopus laevis, or Gallus gallus.

[0096] In some embodiments, the TMD includes an amino acid sequence exhibiting at least 70%, at least 75%, at least 80%, at least 85%, at least 90%, at least 95%, at least 96%, at least 97%, at least 98%, at least 99% sequence identity to one or more of SEQ ID NOS: 181, 206, 241, and 242 in the Sequence Listing. In some embodiments, the TMD includes an amino acid sequence having at least 90% sequence identity to a sequence selected from the group consisting of SEQ ID NOS: 181, 206, 241, and 242. In some embodiments, the TMD includes an amino acid sequence having at least 95% sequence identity to a sequence selected from the group consisting of SEQ ID NOS: 181, 206, 241, and 242. In some embodiments, the TMD includes an amino acid sequence having 100% sequence identity to one or more of SEQ ID NOS: 181, 206, 241, and 242. In some embodiments, the TMD includes an amino acid sequence having a sequence selected from the group consisting of SEQ ID NOS: 181, 206, 241, and 242, wherein one, two, three, four, or five of the amino acid residues in any one of the SEQ ID NOS: 181, 206, 241, and 242 is/are substituted by a different amino acid residue.

[0097] In some embodiments, the amino acid substitution(s) within the TMD includes one or more substitutions within a “GV” motif of the TMD. In some embodiments, at least oone of such substitution(s) comprises a substitution to alanine. For example, one, two, three, four, five, or more of the amino acid residues of the sequence FMYVAAAAFVLLFFVGCGVLLS (SEQ ID NO: 181), as well as any one of the sequences set forth in SEQ ID NOS: 206, 241, and 242, may be substituted by a different amino acid residue. In some embodiments, the amino acid residue at position 18 and/or 19 of the “GV” motif within SEQ ID NO: 181 is substituted by a different amino acid residue. In some embodiments, the glycine residue at position 18 of SEQ ID NO: 181 is substituted by a different amino acid residue. In some embodiments, the valine residue at position 19 of SEQ ID NO: 181 is substituted by a different amino acid residue. In some embodiments, the transmembrane domain comprises an amino acid sequence having a sequence corresponding to SEQ ID NO: 181 with a mutation at the position corresponding to position 18 of SEQ ID NO: 181, such as G18A mutations. In some embodiments, the transmembrane domain comprises an amino acid sequence having a sequence corresponding to SEQ ID NO: 181 with a mutation at the position corresponding to position 19 of SEQ ID NO: 181, such as V19A mutations.

### Stop-Transfer Sequences (STS)

[0098] The chimeric polypeptides and receptors of the disclosure include an STS which comprises a charged, hydrophilic domain located between the TMD and the ICD. Without being bound to any particular theory, this domain disposed between the TMD and the ICD prevents the ICD from entering the plasma membrane. In some embodiments, a single-chain peptide comprising about 1 to about 40 amino acid residues (e.g., 1, 2, 3, 4, 5, 6, 7, 8, 9, 10, 11, 12, 13, 14, 15, 16, 17, 18, 19, 20, or more amino acid residues) in which most of the residues have charged side chains unde physiological conditions can be used as a STS. In short STS embodiments (e.g., less than about 6 amino acids), about 5 or 6 of the amino acids will have charged side chains. In some embodiments, the STS includes about 1 to 15, about 5 to 20, about 8 to 25, about 10 to 30, about 12 to 35, about 14 to 40, about 5 to 40, about 10 to 35, about 15 to 30, about 20 to 25, about 20 to 40, about 10 to 30, about 4 to 20, or about 5 to 25 amino acid residues. In some embodiments, the STS includes about 4 to 10, about 5 to 12, about 6 to 14, about 7 to 18, about 8 to 20, about 9 to 22, about 10 to 24, or about 11 to 26 amino acid residues. In some embodiments, the STS includes about 4 to 10 residues, such as, 4, 5, 6, 7, 8, 9, or 10 amino acid residues.

[0099] In some embodiments, the STS includes a sequence having at least about 80% sequence identity, such as, at least 80%, at least 85%, at least 90%, at least 95%, at least 96%, at least 97%, at least 98%, or 99% sequence identity to the STS domain of a Type 1 receptor. In some embodiments, the STS includes an amino acid sequence having at least 90% sequence identity to the STS domain of a Type 1 receptor. In some embodiments, the STS includes an amino acid sequence having at least about 90% sequence identity to SEQ ID NOS: 100-174 and 207. In some embodiments, the STS includes an amino acid sequence having at least about 95% sequence identity to SEQ ID NOS: 100-174 and 207. In some embodiments, the STS includes an amino acid sequence having about 100% sequence identity to SEQ ID NOS: 100-174 and 207. In some embodiments, the STS includes an amino acid sequence having at least about 90% sequence identity to SEQ ID NOS: 105, 107, 123, 143, 146, 153-155, 161, 163, 164, 166, 171, 172, 174, or 207. In some embodiments, the STS includes an amino acid sequence having at least about 95% sequence identity to SEQ ID NOS: 105, 107, 123, 143, 146, 153-155, 161, 163, 164, 166, 171, 172, 174, or 207. In some embodiments, the STS includes an amino acid sequence having about 100% sequence identity to SEQ ID NOS: 105, 107, 123, 143, 146, 153-155, 161, 163, 164, 166, 171, 172, 174, or 207. In some embodiments, the STS includes an amino acid sequence of SEQ ID NOS: 100-174 and 207, wherein one, two, three, four, or five of the amino acid residues in SEQ ID NOS: 100-174 and 207 is/are substituted by a different amino acid residue. In some embodiments, the STS includes an amino acid sequence of SEQ ID NOS: 105, 107, 123, 143, 146, 153-155, 161, 163, 164, 166, 171, 172, 174, or 207, wherein one, two, three, four, or five of the amino acid residues in SEQ ID NOS: 105, 107, 123, 143, 146, 153-155, 161, 163, 164, 166, 171, 172, 174, or 207 is/are substituted by a different amino acid residue. In some embodiments, the STS comprises a sequence comprising only Lys (K) or Arg (R) in the first 4 residues. In some embodiments, the STS comprises one, two, three, four, five, or more basic residues. In some embodiments, the STS comprises five, four, three, two, one, or zero aromatic residues or residues with hydrophobic and/or bulky side chains.

### Intracellular Domain (ICD)

[0100] The chimeric receptor of the disclosure includes a transcriptional regulator. The transcriptional regulator of the disclosure is a biochemical element that acts to promote or inhibit the transcription of a promoter-driven DNA sequence. Transcriptional regulators suitable for the compositions and methods of the disclosure can be naturally-occurring transcriptional regulators or can be engineered, designed, or modified so as to provide desired and/or improved properties, e.g., modulating transcription. In some embodiments, the transcriptional regulator directly regulates differentiation of the cell. In some embodiments, the transcriptional regulator indirectly modulates differentiation of the cell by modulating the expression of a second transcription factor. It will be understood by one having ordinary skill in the art that a transcriptional regulator can be a transcriptional activator or a transcriptional repressor. In some embodiments, the transcriptional regulator is a transcriptional repressor. In some embodiments, the transcriptional regulator is a transcriptional activator. In some embodiments, the transcriptional regulator can further include a nuclear localization signal. In some embodiments, the transcriptional regulator is selected from Gal4-VP16, Gal4-VP64, tetR-VP64, ZFHD1-VP64, Gal4-KRAB, and HAP1-VP16. In some embodiments, the transcriptional regulator is Gal4-VP64.

[0101] In some embodiments, the ICD includes a sequence having at least 80% sequence identity, such as, at least 80%, at least 85%, at least 90%, at least 95%, at least 96%, at least 97%, at least 98%, or 99% sequence identity to SEQ ID NO: 182 in the Sequence Listing. In some embodiments, the ICD includes an amino acid sequence having at least 90% sequence identity to SEQ ID NO: 182. In some embodiments, the ICD includes an amino acid sequence having at least 95% sequence identity to SEQ ID NO: 182. In some embodiments, the ICD includes an amino acid sequence having at least 100% sequence identity to SEQ ID NO: 182. In some embodiments, the ICD includes an amino acid sequence of SEQ ID NO: 182, wherein one, two, three, four, or five of the amino acid residues in SEQ ID NO: 182 is/are substituted by a different amino acid residue.

### Additional Domains

[0102] In some embodiments, the Notch extracellular domains located N-terminally to the TMD can further include an additional amino acid sequence or structural domain, for example a membrane localization signal such as a CD8A signal (SEQ ID NO: 176), a detectable marker such as a myc tag (SEQ ID NO: 177) or His tag, and the like.

[0103] In some embodiments, the chimeric polypeptide of the disclosure comprises: (a) a linking polypeptide comprising an amino acid sequence having at least 80% sequence identity to any one of SEQ ID NOS: 178-180 and 183-198; (b) a TMD comprising an amino acid sequence having at least 80% sequence identity to either of SEQ ID NO: 181 or 206; and (c) an STS comprising an amino acid sequence having at least 80% sequence identity to any one of SEQ ID NOS: 100-174 and 207. In some embodiments, the chimeric polypeptide of the disclosure comprises: (a) a linking polypeptide comprising an amino acid sequence having at least about 90% sequence identity to any one of SEQ ID NOS: 178-180 and 183-198; (b) a TMD comprising an amino acid sequence having at least 90% sequence identity to either of SEQ ID NOS: 181 or 206; and (c) an STS comprising an amino acid sequence having at least 90% sequence identity to any one of SEQ ID NOS: 100-174 and 207. In some embodiments, the chimeric polypeptide of the disclosure comprises: (a) a linking polypeptide comprising an amino acid sequence having at least 95% sequence identity to any one of SEQ ID NO: 178-180 and 183-198; (b) a TMD comprising an amino acid sequence having at least 95% sequence identity to any one of SEQ ID NOS: 181, 206, 241, and 242; and (c) an STS comprising an amino acid sequence having at least 95% sequence identity to SEQ ID NOs: 100-174 and 207.

[0104] In some embodiments, the chimeric polypeptide of the disclosure comprises: (a) a linking polypeptide comprising an amino acid sequence selected from the group consisting of SEQ ID NO: 178-180 and 183-198; (b) a TMD comprising an amino acid sequence selected from the group consisting of SEQ ID NOS: 181, 206, 241, and 242; and (c) an STS comprising an amino acid sequence selected from any one of SEQ ID NOs: 100-174 and 207.

[0105] In some embodiments, the chimeric polypeptide of the disclosure comprises: (a) a linking polypeptide comprising an amino acid sequence selected from the group consisting of SEQ ID NO: 178-180 and 183-198, wherein one, two, three, four, or five of the amino acid residues in any one of the SEQ ID NOS: 178-180 and 183-198 is/are substituted by a different amino acid residue; (b) a TMD comprising an amino acid sequence selected from the group consisting of SEQ ID NOS: 181, 206, 241, and 242, wherein one, two, three, four, or five of the amino acid residues in any one of the SEQ ID NOS: 181, 206, 241, and 242 is/are substituted by a different amino acid residue; and (c) an STS comprising an amino acid sequence of any one of SEQ ID NOs: 100-174 and 207, wherein one, two, three, four, or five of the amino acid residues in any one of SEQ ID NOs: 100-174 and 207 is/are substituted by a different amino acid residue.

[0106] In some embodiments, the chimeric receptor of the disclosure includes an amino acid sequence having at least about 80%, 90%, 95%, 96%, 97, 98%, 99%, or 100% sequence identity to a chimeric receptor disclosed herein. In some embodiments, provided herein are chimeric receptors including an amino acid sequence having at least about 80%, 90%, 95%, 96%, 97, 98%, 99%, or 100% sequence identity to any one of SEQ ID NOs: 1-99.

### Nucleic Acid Molecules

[0107] In one aspect, some embodiments disclosed herein relate to nucleic acid molecules that include nucleotide sequences encoding the chimeric polypeptides provided herein, including expression cassettes, and expression vectors containing these nucleic acid molecules operably linked to heterologous nucleic acid sequences such as, for example, regulatory sequences which facilitate in vivo expression of the receptor in a host cell.

[0108] Nucleic acid molecules of the present disclosure can be nucleic acid molecules of any length, including nucleic acid molecules that are generally between about 5 Kb and about 50 Kb, for example between about 5 Kb and about 40 Kb, between about 5 Kb and about 30 Kb, between about 5 Kb and about 20 Kb, or between about 10 Kb and about 50 Kb, for example between about 15 Kb to 30 Kb, between about 20 Kb and about 50 Kb, between about 20 Kb and about 40 Kb, about 5 Kb and about 25 Kb, or about 30 Kb and about 50 Kb.

[0109] In some embodiments, provided herein is a nucleic acid molecule including a nucleotide sequence that encodes a chimeric polypeptide including, from N-terminus to C- terminus (a) an extracellular ligand-binding domain having a binding affinity for a selected ligand; (b) a linking polypeptide; (c) a TMD including one or more ligand-inducible proteolytic cleavage sites; and (d) an intracellular domain including a transcriptional regulator, wherein binding of the selected ligand to the extracellular ligand-binding domain induces cleavage at the ligand-inducible proteolytic cleavage site between the transcriptional regulator and the linking polypeptide, and wherein the chimeric polypeptide does not include a LIN-12-Notch repeat (LNR) and/or a heterodimerization domain (HD) of a Notch receptor.

[0110] In some embodiments, the nucleotide sequence is incorporated into an expression cassette or an expression vector. It will be understood that an expression cassette generally includes a construct of genetic material that contains coding sequences and enough regulatory information to direct proper transcription and/or translation of the coding sequences in a recipient cell, in vivo and/or ex vivo. Generally, the expression cassette may be inserted into a vector for targeting to a desired host cell and/or into an individual. Thus, in some embodiments, an expression cassette of the disclosure include a coding sequence for the chimeric polypeptide as disclosed herein, which is operably linked to expression control elements, such as a promoter, and optionally, any or a combination of other nucleic acid sequences that affect the transcription or translation of the coding sequence.

[0111] In some embodiments, the nucleotide sequence is incorporated into an expression vector. It will be understood by one skilled in the art that the term “vector” generally refers to a recombinant polynucleotide construct designed for transfer between host cells, and that may be used for the purpose of transformation, e.g., the introduction of heterologous DNA into a host cell. As such, in some embodiments, the vector can be a replicon, such as a plasmid, phage, or cosmid, into which another DNA segment may be inserted so as to bring about the replication of the inserted segment. In some embodiments, the expression vector can be an integrating vector.

[0112] In some embodiments, the expression vector can be a viral vector. As will be appreciated by one of skill in the art, the term “viral vector” is widely used to refer either to a nucleic acid molecule (e.g., a transfer plasmid) that includes virus-derived nucleic acid elements that generally facilitate transfer of the nucleic acid molecule or integration into the genome of a cell or to a viral particle that mediates nucleic acid transfer. Viral particles will generally include various viral components and sometimes also host cell components in addition to nucleic acid(s). The term viral vector may refer either to a virus or viral particle capable of transferring a nucleic acid into a cell or to the transferred nucleic acid itself. Viral vectors and transfer plasmids contain structural and/or functional genetic elements that are primarily derived from a virus. The term “retroviral vector” refers to a viral vector or plasmid containing structural and functional genetic elements, or portions thereof, that are primarily derived from a retrovirus. The term “lentiviral vector” refers to a viral vector or plasmid containing structural and functional genetic elements, or portions thereof, including LTRs that are primarily derived from a lentivirus.

[0113] In some embodiments, provided herein are nucleic acid molecules encoding a polypeptide with an amino acid sequence having at least about 80%, 90%, 95%, 96%, 97, 98%, 99%, or 100% sequence identity to a chimeric receptor disclosed herein. In some embodiments, provided herein are nucleic acid molecules encoding a polypeptide with an amino acid sequence having at least about 80%, 90%, 95%, 96%, 97, 98%, 99%, or 100% sequence identity to any one of SEQ ID NOS: 1-99 identified in the Sequence Listing.

[0114] The nucleic acid sequences encoding the chimeric receptors can be optimized for expression in the host cell of interest. For example, the G-C content of the sequence can be adjusted to levels average for a given cellular host, as calculated by reference to known genes expressed in the host cell. Methods for codon optimization are known in the art. Codon usages within the coding sequence of the chimeric receptor disclosed herein can be optimized to enhance expression in the host cell, such that about 1%, about 5%, about 10%, about 25%, about 50%, about 75%, or up to 100% of the codons within the coding sequence have been optimized for expression in a particular host cell.

[0115] Some embodiments disclosed herein relate to vectors or expression cassettes including a recombinant nucleic acid molecule encoding the chimeric receptors disclosed herein. The expression cassette generally contains coding sequences and sufficient regulatory information to direct proper transcription and/or translation of the coding sequences in a recipient cell, in vivo and/or ex vivo. The expression cassette may be inserted into a vector for targeting to a desired host cell and/or into an individual. An expression cassette can be inserted into a plasmid, cosmid, virus, autonomously replicating polynucleotide molecule, phage, as a linear or circular, single-stranded or double-stranded, DNA or RNA polynucleotide molecule, derived from any source, capable of genomic integration or autonomous replication, including a nucleic acid molecule where one or more nucleic acid sequences has been linked in a functionally operative manner, i.e., operably linked.

[0116] Also provided herein are vectors, plasmids, or viruses containing one or more of the nucleic acid molecules encoding any chimeric receptor disclosed herein. The nucleic acid molecules can be contained within a vector that is capable of directing their expression in, for example, a cell that has been transformed/transduced with the vector. Suitable vectors for use in eukaryotic and prokaryotic cells are known in the art and are commercially available, or readily prepared by a skilled artisan. See, e.g, J. Sambrook & D.W. Russell (2012). Molecular Cloning: A Laboratory Manual (4th ed.). Cold Spring Harbor, NY: Cold Spring Harbor Laboratory and J. Sambrook & D.W. Russell (2001). Molecular Cloning: A Laboratory Manual (3rd ed.). Cold Spring Harbor, NY: Cold Spring Harbor Laboratory (jointly referred to herein as “Sambrook”); F.M. Ausubel (1987). Current Protocols in Molecular Biology. New York, NY: Wiley (including supplements through 2014); D.M. Bollag et al. (1996). Protein Methods. New York, NY: Wiley-Liss; Huang, L. et al. (2005). Nonviral Vectors for Gene Therapy. San Diego: Academic Press; Kaplitt, M. G. et al. (1995). Viral Vectors: Gene Therapy and Neuroscience Applications. San Diego, CA: Academic Press; Lefkovits, I. (1997). The Immunology Methods Manual: The Comprehensive Sourcebook of Techniques. San Diego, CA: Academic Press; Doyle, A. et al. (1998). Cell and Tissue Culture: Laboratory Procedures in Biotechnology. New York, NY: Wiley; K.B. Mullis et al., (1994). PCR: The Polymerase Chain Reaction. Boston: Birkhauser Publisher; Greenfield, E. A. (2014). Antibodies: A Laboratory Manual (2nd ed.). New York, NY: Cold Spring Harbor Laboratory Press; Beaucage, S. L. et al. (2000). Current Protocols in Nucleic Acid Chemistry. New York, NY: Wiley, (including supplements through 2014); and Makrides, S. C. (2003). Gene Transfer and Expression in Mammalian Cells. Amsterdam, NL: Elsevier Sciences B.V., the disclosures of which are incorporated herein by reference.

[0117] DNA vectors can be introduced into eukaryotic cells via conventional transformation or transfection techniques. Suitable methods for transforming or transfecting host cells can be found in Sambrook et al. (2012) and other standard molecular biology laboratory manuals, such as, calcium phosphate transfection, DEAE-dextran mediated transfection, transfection, microinjection, cationic lipid-mediated transfection, electroporation, transduction, scrape loading, ballistic introduction, nucleoporation, hydrodynamic shock, and infection.

[0118] Viral vectors that can be used in the disclosure include, for example, retrovirus vectors, adenovirus vectors, and adeno-associated virus vectors, lentivirus vectors, herpes virus, simian virus 40 (SV40), and bovine papilloma virus vectors (see, e.g., Gluzman (Ed.), Eukaryotic Viral Vectors, CSH Laboratory Press, Cold Spring Harbor, N.Y.). For example, a chimeric receptor as disclosed herein can be produced in a eukaryotic host, such as a mammalian cells (e.g., COS cells, NIH 3T3 cells, or HeLa cells). These cells are available from many sources, including the American Type Culture Collection (Manassas, Va.). In selecting an expression system, care should be taken to ensure that the components are compatible with one another. Artisans or ordinary skill are able to make such a determination. Furthermore, if guidance is required in selecting an expression system, skilled artisans may consult P. Jones, “Vectors: Cloning Applications”, John Wiley and Sons, New York, N.Y., 2009).

[0119] The nucleic acid molecules provided can contain naturally occurring sequences, or sequences that differ from those that occur naturally, but because the genetic code is degenerate encode the same polypeptide, e.g., an antibody. These nucleic acid molecules can consist of RNA or DNA (for example, genomic DNA, cDNA, or synthetic DNA, such as that produced by phosphoramidite-based synthesis), or combinations or modifications of the nucleotides within these types of nucleic acids. In addition, the nucleic acid molecules can be double-stranded or single-stranded (e.g., either a sense or an antisense strand).

[0120] The nucleic acid molecules are not limited to sequences that encode polypeptides (e.g., antibodies); some or all of the non-coding sequences that lie upstream or downstream from a coding sequence (e.g., the coding sequence of a chimeric receptor) can also be included. Those of ordinary skill in the art of molecular biology are familiar with routine procedures for isolating nucleic acid molecules. They can, for example, be generated by treatment of genomic DNA with restriction endonucleases, or by performance of the polymerase chain reaction (PCR). In the event the nucleic acid is a ribonucleic acid (RNA), RNA can be produced, for example, by in vitro transcription.

### Recombinant Cells and Cell Cultures

[0121] The nucleic acid of the present disclosure can be introduced into a host cell, such as a human T lymphocyte, to produce a recombinant cell containing the nucleic acid molecule. Accordingly, some embodiments of the disclosure relate to a methods for making a recombinant cell, including (a) providing a cell capable of protein expression and (b) contacting the provided cell with a recombinant nucleic acid of the disclosure.

[0122] Introduction of the nucleic acid molecules of the disclosure into cells can be achieved by viral infection, transfection, conjugation, protoplast fusion, lipofection, electroporation, nucleofection, calcium phosphate precipitation, polyethyleneimine (PEI)-mediated transfection, DEAE-dextran mediated transfection, liposome-mediated transfection, particle gun technology, calcium phosphate precipitation, direct micro-injection, nanoparticle-mediated nucleic acid delivery, and the like.

[0123] Accordingly, in some embodiments, the nucleic acid molecules can be delivered by viral or non-viral delivery vehicles known in the art. For example, the nucleic acid molecule can be stably integrated in the host genome, or can be episomally replicating, or present in the recombinant host cell as a mini-circle expression vector for a stable or transient expression. Accordingly, in some embodiments disclosed herein, the nucleic acid molecule is maintained and replicated in the recombinant host cell as an episomal unit. In some embodiments, the nucleic acid molecule is stably integrated into the genome of the recombinant cell. Stable integration can be completed using classical random genomic recombination techniques or with more precise genome editing techniques such as using guide RNA directed CRISPR/Cas9, or DNA-guided endonuclease genome editing NgAgo (Natronobacterium gregoryi Argonaute), or TALEN genome editing (transcription activator-like effector nucleases). In some embodiments, the nucleic acid molecule present in the recombinant host cell as a mini-circle expression vector for a stable or transient expression.

[0124] The nucleic acid molecules can be encapsulated in a viral capsid or a lipid nanoparticle. Alternatively, endonuclease polypeptide(s) can be delivered by viral or non-viral delivery vehicles known in the art, such as electroporation or lipid nanoparticles. For example, introduction of nucleic acids into cells may be achieved using viral transduction methods. In a non-limiting example, adeno-associated virus (AAV) is a non-enveloped virus that can be engineered to deliver nucleic acids to target cells via viral transduction. Several AAV serotypes have been described, and all of the known serotypes can infect cells from multiple diverse tissue types. AAV is capable of transducing a wide range of species and tissues in vivo with no evidence of toxicity, and it generates relatively mild innate and adaptive immune responses.

[0125] Lentiviral systems are also amenable for nucleic acid delivery and gene therapy via viral transduction. Lentiviral vectors offer several attractive properties as gene-delivery vehicles, including: (i) sustained gene delivery through stable vector integration into host genome; (ii) the capability of infecting both dividing and non-dividing cells; (iii) broad tissue tropisms, including important gene- and cell-therapy-target cell types; (iv) no expression of viral proteins after vector transduction; (v) the ability to deliver complex genetic elements, such as polycistronic or intron-containing sequences; (vi) potentially safer integration site profile; and (vii) a relatively easy system for vector manipulation and production.

[0126] In some embodiments, host cells can be genetically engineered (e.g., transduced or transformed or transfected) with, for example, a vector construct of the present application that can be, for example, a viral vector or a vector for homologous recombination that includes nucleic acid sequences homologous to a portion of the genome of the host cell, or can be an expression vector for the expression of the polypeptides of interest. Host cells can be either untransformed cells or cells that have already been transfected with at least one nucleic acid molecule.

[0127] In some embodiments, the recombinant cell is a prokaryotic cell or a eukaryotic cell. In some embodiments, the cell is in vivo. In some embodiments, the cell is ex vivo. In some embodiments, the cell is in vitro. In some embodiments, the recombinant cell is an animal cell. In some embodiments, the animal cell is a mammalian cell. In some embodiments, the animal cell is a human cell. In some embodiments, the cell is a non-human primate cell. In some embodiments, the mammalian cell is an immune cell, a neuron, an epithelial cell, and endothelial cell, or a stem cell. In some embodiments, the recombinant cell is an immune system cell, e.g., a lymphocyte (e.g., a T cell or NK cell), or a dendritic cell. In some embodiments, the immune cell is a B cell, a monocyte, a natural killer (NK) cell, a basophil, an eosinophil, a neutrophil, a dendritic cell, a macrophage, a regulatory T cell, a helper T cell, a cytotoxic T cell, or other T cell. In some embodiments, the immune system cell is a T lymphocyte.

[0128] In some embodiments, the cell is a stem cell. In some embodiments, the cell is a hematopoietic stem cell. In some embodiments of the cell, the cell is a lymphocyte. In some embodiments, the cell is a precursor T cell or a T regulatory (Treg) cell. In some embodiments, the cell is a CD34+, CD8+, or a CD4+ cell. In some embodiments, the cell is a CD8+ T cytotoxic lymphocyte cell selected from the group consisting of naïve CD8+ T cells, central memory CD8+ T cells, effector memory CD8+ T cells, and bulk CD8+ T cells. In some embodiments of the cell, the cell is a CD4+ T helper lymphocyte cell selected from the group consisting of naïve CD4+ T cells, central memory CD4+ T cells, effector memory CD4+ T cells, and bulk CD4+ T cells. In some embodiments, the cell can be obtained by leukapheresis of a blood sample obtained from a human subject.

[0129] In some embodiments, the recombinant cell further includes a second nucleic acid molecule as disclosed herein, wherein the first nucleic acid molecule and the second nucleic acid molecule do not have the same sequence. In some embodiments, the recombinant cell further includes a second chimeric polypeptide as disclosed herein, wherein the first chimeric polypeptide and the second chimeric polypeptide do not have the same sequence. In some embodiments, the first chimeric polypeptide modulates the expression and/or activity of the second chimeric polypeptide.

[0130] In some embodiments, the recombinant cell further includes an expression cassette encoding a protein of interest operably linked to a promoter, wherein expression of the protein of interest is modulated by the chimeric receptor transcriptional regulator. In some embodiments, the protein of interest is heterologous to the recombinant cell. In principle, there are no particular limitations with regard to suitable proteins whose expression is modulated by the chimeric receptor transcriptional regulator. Exemplary protein types suitable for use with the compositions and methods disclosed herein include cytokines, cytotoxins, chemokines, immunomodulators, pro-apoptotic factors, anti-apoptotic factors, hormones, differentiation factors, dedifferentiation factors, immune cell receptors, or reporters. In some embodiments, the immune cell receptor comprises a T-cell receptor (TCR). In some embodiments, the immune cell receptor comprises a chimeric antigen receptor (CAR). In some embodiments, the expression cassette encoding the protein of interest is incorporated into the same nucleic acid molecule that encodes the chimeric receptor of the disclosure. In some embodiments, the expression cassette encoding the protein of interest is incorporated into a second expression vector that is separate from the nucleic acid molecule encoding the chimeric receptor of the disclosure.

[0131] In another aspect, provided herein are various cell cultures including at least one recombinant cell as disclosed herein, and a culture medium. Generally, the culture medium can be any one of suitable culture media for the cell cultures described herein. Techniques for transforming a wide variety of the above-mentioned host cells and species are known in the art and described in the technical and scientific literature. Accordingly, cell cultures including at least one recombinant cell as disclosed herein are also within the scope of this application. Methods and systems suitable for generating and maintaining cell cultures are known in the art.

### Pharmaceutical Compositions

[0132] In some embodiments, the nucleic acids, and recombinant cells of the disclosure can be incorporated into compositions, including pharmaceutical compositions. Such compositions generally include the nucleic acids, and/or recombinant cells, and a pharmaceutically acceptable excipient, e.g., a carrier.

[0133] Pharmaceutical compositions suitable for injectable use include sterile aqueous solutions (where water soluble) or dispersions and sterile powders for the extemporaneous preparation of sterile injectable solutions or dispersion. For intravenous administration, suitable carriers include physiological saline, bacteriostatic water, Cremophor EL™. (BASF, Parsippany, N.J.), or phosphate buffered saline (PBS). In all cases, the composition should be sterile and should be fluid to the extent that easy syringability exists. It should be stable under the conditions of manufacture and storage and must be preserved against the contaminating action of microorganisms such as bacteria and fungi. The carrier can be a solvent or dispersion medium containing, for example, water, ethanol, polyol (for example, glycerol, propylene glycol, and liquid polyethylene glycol, and the like), and suitable mixtures thereof. The proper fluidity can be maintained, for example, by the use of a coating such as lecithin, by the maintenance of the required particle size in the case of dispersion and by the use of surfactants, e.g., sodium dodecyl sulfate. Prevention of the action of microorganisms can be achieved by various antibacterial and antifungal agents, for example, parabens, chlorobutanol, phenol, ascorbic acid, thimerosal, and the like. In many cases, it will be generally to include isotonic agents, for example, sugars, polyalcohols such as mannitol, sorbitol, and/or sodium chloride in the composition. Prolonged absorption of the injectable compositions can be brought about by including in the composition an agent which delays absorption, for example, aluminum monostearate and gelatin.

[0134] Sterile injectable solutions can be prepared by incorporating the active compound in the required amount in an appropriate solvent with one or a combination of ingredients enumerated above, as required, followed by filtered sterilization. Generally, dispersions are prepared by incorporating the active compound into a sterile vehicle, which contains a basic dispersion medium and the required other ingredients from those enumerated above.

[0135] In some embodiments, the chimeric polypeptides and Notch receptors of the disclosure can also be administered by transfection or infection using methods known in the art, including but not limited to the methods described in McCaffrey et al. (Nature 418:6893, 2002), Xia et al. (Nature Biotechnol. 20:1006-10, 2002), or Putnam (Am. J. Health Syst. Pharm. 53:151-60, 1996, erratum at Am. J. Health Syst. Pharm. 53:325, 1996).

### METHODS OF THE DISCLOSURE

[0136] Administration of any one of the therapeutic compositions described herein, e.g., nucleic acids, recombinant cells, and pharmaceutical compositions, can be used to treat individuals in the treatment of relevant health conditions or diseases, such as cancers and chronic infections. In some embodiments, the nucleic acids, recombinant cells, and pharmaceutical compositions described herein can be incorporated into therapeutic agents for use in methods of treating an individual who has, who is suspected of having, or who may be at high risk for developing one or more autoimmune disorders or diseases associated with checkpoint inhibition. Exemplary autoimmune disorders and diseases can include, without limitation, celiac disease, type 1 diabetes, Graves' disease, inflammatory bowel disease, multiple sclerosis, psoriasis, rheumatoid arthritis, and systemic lupus erythematosus.

[0137] Accordingly, in one aspect, some embodiments of the disclosure relate to methods for inhibiting an activity of a target cell in an individual, the methods include administering to the individual a first therapy including one or more of nucleic acids, recombinant cells, and pharmaceutical compositions as disclosed herein, wherein the first therapy inhibits an activity of the target cell. For example, an activity of the target cell may be inhibited if its proliferation is reduced, if its pathologic or pathogenic behavior is reduced, if its destroyed or killed, and the like. Inhibition includes a reduction of the measured quantity of at least about 10%, about 15%, about 20%, about 25%, about 30%, about 35%, about 40%, about 45%, about 50%, about 55%, about 60%, about 65%, about 70%, about 75%, about 80%, about 85%, about 90%, or about 95%. In some embodiments, the methods include administering to the individual an effective number of the recombinant cell as disclosed herein, wherein the recombinant cell inhibits an activity of the target cell in the individual. Generally, the target cell of the disclosed methods can be any cell and can be, for example an acute myeloma leukemia cell, an anaplastic lymphoma cell, an astrocytoma cell, a B-cell cancer cell, a breast cancer cell, a colon cancer cell, an ependymoma cell, an esophageal cancer cell, a glioblastoma cell, a glioma cell, a leiomyosarcoma cell, a liposarcoma cell, a liver cancer cell, a lung cancer cell, a mantle cell lymphoma cell, a melanoma cell, a neuroblastoma cell, a non-small cell lung cancer cell, an oligodendroglioma cell, an ovarian cancer cell, a pancreatic cancer cell, a peripheral T cell lymphoma cell, a renal cancer cell, a sarcoma cell, a stomach cancer cell, a carcinoma cell, a mesothelioma cell, or a sarcoma cell. In some embodiments, the target cell is a pathogenic cell.

[0138] In another aspect, some embodiments of the disclosure relate to methods for the treatment of a health condition (e.g., disease) in an individual in need thereof, the methods include administering to the individual a first therapy including one or more of chimeric polypeptides, Fn Notch receptors, nucleic acids, recombinant cells, and pharmaceutical compositions as disclosed herein, wherein the first therapy treats the health condition in the individual. In some embodiments, the methods include administering to the individual a first therapy including an effective number of the recombinant cell an effective number of the recombinant cell as disclosed herein, wherein the recombinant cell treats the health condition.

[0139] In another aspect, some embodiments of the disclosure relate to methods for assisting in the treatment of a health condition (e.g., disease) in an individual in need thereof, the methods including administering to the individual a first therapy including one or more of the nucleic acids, recombinant cells, and/or pharmaceutical compositions as disclosed herein, and a second therapy, wherein the first and second therapies together treat the health condition in the individual. In some embodiments, the methods include administering to the individual a first therapy including an effective number of the recombinant cells as disclosed herein, wherein the recombinant cells treat the health condition.

### Administration of Recombinant Cells Into an Individual

[0140] In some embodiments, the methods of the disclosure involve administering an effective amount or number the recombinants cells of the disclosure to an individual who is in need of such method. This administering step can be accomplished using any method of implantation known in the art. For example, the recombinants cells can be injected directly in the individual's blood or otherwise administered to the individual.

[0141] In some embodiments, the methods disclosed herein include administering, which can be interchangeably used with “introducing” and “transplanting,” recombinant cells into an individual, by a method or route that results in at least partial localization of the introduced cells at a desired site such that a desired effect(s) is produced. The recombinant cells or their differentiated progeny can be administered by any appropriate route that results in delivery to a desired location in the individual where at least a portion of the administered cells or components of the cells remain viable. The period of viability of the cells after administration to an individual can be as short as a few hours, e.g., twenty-four hours, to a few days, to as long as several years, or even the life time of the individual, i.e., long-term engraftment.

[0142] When provided prophylactically, the recombinant cells described herein can be administered to an individual in advance of any symptom of a disease or condition to be treated. Accordingly, in some embodiments the prophylactic administration of a recombinant stem cell population serves to prevent the occurrence of symptoms of the disease or condition.

[0143] When provided therapeutically in some embodiments, recombinant stem cells are provided at (or after) the onset of a symptom or indication of a disease or condition, e.g., upon the onset of disease or condition.

[0144] For use in the various embodiments described herein, an effective amount of recombinant cells as disclosed herein, can be at least 10² cells, at least 5×10² cells, at least 10³ cells, at least 5×10³ cells, at least 10⁴ cells, at least 5×10⁴ cells, at least 10⁵ cells, at least 2×10⁵ cells, at least 3×10⁵ cells, at least 4×10⁵ cells, at least 5×10⁵ cells, at least 6×10⁵ cells, at least 7×10⁵ cells, at least 8×10⁵ cells, at least 9×10⁵ cells, at least 1×10⁶ cells, at least 2×10⁶ cells, at least 3×10⁶ cells, at least 4×10⁶ cells, at least 5×10⁶ cells, at least 6×10⁶ cells, at least 7×10⁶ cells, at least 8×10⁶ cells, at least 9×10⁶ cells, or multiples thereof. The recombinant cells can be derived from one or more donors or can be obtained from an autologous source. In some embodiments described herein, the recombinant cells are expanded in culture prior to administration to an individual in need thereof.

[0145] In some embodiments, the delivery of a recombinant cell composition (e.g., a composition comprising a plurality of recombinant cells according to any of the cells described herein) into an individual by a method or route results in at least partial localization of the cell composition at a desired site. A cell composition can be administered by any appropriate route that results in effective treatment in the individual, e.g., administration results in delivery to a desired location in the individual where at least a portion of the composition delivered, e.g., at least 1×10⁴ cells, is delivered to the desired site for a period of time. Modes of administration include injection, infusion, instillation, and the like. “Injection” includes, without limitation, intravenous, intramuscular, intra-arterial, intrathecal, intraventricular, intracapsular, intraorbital, intracardiac, intradermal, intraperitoneal, transtracheal, subcutaneous, subcuticular, intraarticular, subcapsular, subarachnoid, intraspinal, intracerebrospinal, and intrasternal injection and infusion. In some embodiments, the route is intravenous. For the delivery of cells, administration by injection or infusion can be made.

[0146] In some embodiments, the recombinant cells are administered systemically, in other words a population of recombinant cells are administered other than directly into a target site, tissue, or organ, such that it enters, instead, the individual's circulatory system and, thus, is subject to metabolism and other like processes.

[0147] The efficacy of a treatment having a composition for the treatment of a disease or condition can be determined by the skilled clinician. However, one skilled in the art will appreciate that a treatment is considered effective treatment if any one or all of the signs or symptoms or markers of disease are improved or ameliorated. Efficacy can also be measured by failure of an individual to worsen as assessed by hospitalization or need for medical interventions (e.g., progression of the disease is halted or at least slowed). Methods of measuring these indicators are known to those of skill in the art and/or described herein. Treatment includes any treatment of a disease in an individual or an animal (some non-limiting examples include a human, or a mammal) and includes: (1) inhibiting the disease, e.g., arresting, or slowing the progression of symptoms; or (2) relieving the disease, e.g., causing regression of symptoms; and (3) preventing or reducing the likelihood of the development of symptoms.

[0148] As discussed above, a therapeutically effective amount includes an amount of a therapeutic composition that is sufficient to promote a particular effect when administered to an individual, such as one who has, is suspected of having, or is at risk for a disease. In some embodiments, an effective amount includes an amount sufficient to prevent or delay the development of a symptom of the disease, alter the course of a symptom of the disease (for example but not limited to, slow the progression of a symptom of the disease), or reverse a symptom of the disease. It is understood that for any given case, an appropriate effective amount can be determined by one of ordinary skill in the art using routine experimentation.

[0149] The efficacy of a treatment including a disclosed therapeutic composition for the treatment of disease can be determined by the skilled clinician. However, a treatment is considered effective treatment if at least any one or all of the signs or symptoms of disease are improved or ameliorated. Efficacy can also be measured by failure of an individual to worsen as assessed by hospitalization or need for medical interventions (e.g., progression of the disease is halted or at least slowed). Methods of measuring these indicators are known to those of skill in the art and/or described herein. Treatment includes any treatment of a disease in an individual or an animal (some non-limiting examples include a human, or a mammal) and includes: (1) inhibiting the disease, e.g., arresting, or slowing the progression of symptoms; or (2) relieving the disease, e.g., causing regression of symptoms; and (3) preventing or reducing the likelihood of the development of symptoms.

[0150] In some embodiments of the disclosed methods, the individual is a mammal. In some embodiments, the mammal is human. In some embodiments, the individual has or is suspected of having a health condition (e.g., disease) associated with inhibition of cell signaling mediated by a cell surface ligand or antigen. The diseases suitable for being treated by the compositions and methods of the disclosure include, but are not limited to, cancers, autoimmune diseases, inflammatory diseases, and infectious diseases. In some embodiments, the disease is a cancer or a chronic infection.

### Additional Therapies

[0151] As discussed above, the recombinant cells, and pharmaceutical compositions described herein can be administered in combination with one or more additional therapeutic agents such as, for example, chemotherapeutics or anti-cancer agents or anti-cancer therapies. Administration “in combination with” one or more additional therapeutic agents includes simultaneous (concurrent) and consecutive administration in any order. In some embodiments, the one or more additional therapeutic agents, chemotherapeutics, anti-cancer agents, or anti--cancer therapies is selected from the group consisting of chemotherapy, radiotherapy, immunotherapy, hormonal therapy, toxin therapy, and surgery. “Chemotherapy” and “anti-cancer agent” are used interchangeably herein. Various classes of anti-cancer agents can be used. Non-limiting examples include: alkylating agents, antimetabolites, anthracyclines, plant alkaloids, topoisomerase inhibitors, podophyllotoxin, antibodies (e.g., monoclonal or polyclonal), tyrosine kinase inhibitors (e.g., imatinib mesylate (Gleevec® or Glivec®)), hormone treatments, soluble receptors and other antineoplastics.

### Methods for Modulating an Activity of a Cell

[0152] In another aspect, provided herein are various methods for modulating an activity of a cell. The methods involve: (a) providing a recombinant cell of the disclosure, and (b) contacting it with a selected ligand, wherein binding of the selected ligand to the extracellular ligand-binding domain induces cleavage of a ligand-inducible proteolytic cleavage site and releases the transcriptional regulator, wherein the released transcriptional regulator modulates an activity of the recombinant cell. One skilled in the art upon reading the present disclosure will appreciate that the disclosed methods can be carried out in vivo, ex vivo, or in vitro.

[0153] Activities of a cell that can be modulated using a method of the present disclosure include, but are not limited to, expression of a selected gene of the cell, proliferation of the cell, apoptosis of the cell, non-apoptotic death of the cell, differentiation of the cell, dedifferentiation of the cell, migration of the cell, secretion of a molecule from the cell, cellular adhesion of the cell, and cytolytic activity of the cell.

[0154] In some embodiments, the released transcriptional regulator modulates expression of a gene product of the cell. In some embodiments, the released transcriptional regulator modulates expression of a heterologous gene product in the cell. A heterologous gene product is one that is not normally produced by the cell. For example, the cell can be genetically modified with a nucleic acid comprising a nucleotide sequence encoding the heterologous gene product.

[0155] In some embodiments, the heterologous gene product is a secreted gene product. In some embodiments, the heterologous gene product is a cell surface gene product. In some cases, the heterologous gene product is an intracellular gene product. In some embodiments, the released transcriptional regulator simultaneously modulates expression of two or more heterologous gene products in the cell.

[0156] In some embodiments, the heterologous gene product in the cell is selected from the group consisting of a chemokine, a chemokine receptor, a chimeric antigen receptor, a cytokine, a cytokine receptor, a differentiation factor, a growth factor, a growth factor receptor, a hormone, a metabolic enzyme, a pathogen derived protein, a proliferation inducer, a receptor, an RNA guided nuclease, a site-specific nuclease, a T cell receptor (TCR), a chimeric antigen receptor (CAR), a toxin, a toxin derived protein, a transcriptional regulator, a transcriptional activator, a transcriptional repressor, a translation regulator, a translational activator, a translational repressor, an activating immuno-receptor, an antibody, an apoptosis inhibitor, an apoptosis inducer, an engineered T cell receptor, an immuno-activator, an immuno-inhibitor, and an inhibiting immuno-receptor.

[0157] In some embodiments, the released transcriptional regulator modulates differentiation of the cell, and wherein the cell is an immune cell, a stem cell, a progenitor cell, or a precursor cell.The chimeric receptors of the disclosure provide a higher degree of expression than a standard SynNotch receptor not having an STS substitution, when using identical binding domains and ICDs. Depending on the ligand/binding domain pair and their affinity, the chimeric receptor can provide expression enhancement of about 10%, about 15%, about 20%, about 25%, about 30%, about 35%, about 40%, about 45%, or about 50% higher than a corresponding SynNotch receptor. Further, chimeric receptors of the disclosure can provide different noise levels (lower or higher levels of expression in the absence of the selected ligand).

[0158] Additionally, the chimeric receptors of the disclosure can provide transcriptional regulation that responds to the degree of T cell activation, independent of ligand binding. This permits additional flexibility in use, for example in cases where it is desired to enhance or suppress a T cell response when activated despite the absence of the chimeric receptor ligand.

### SYSTEMS AND KITS

[0159] Also provided herein are systems and kits including the chimeric receptors, recombinant nucleic acids, recombinant cells, or pharmaceutical compositions provided and described herein as well as written instructions for making and using the same. For example, provided herein, in some embodiments, are systems and/or kits that include one or more of: an chimeric polypeptide as described herein, a chimeric receptor as described herein, a recombinant nucleic acids as described herein, a recombinant cell as described herein, or a pharmaceutical composition as described herein. In some embodiments, the systems and/or kits of the disclosure further include one or more syringes (including pre-filled syringes) and/or catheters (including pre-filled syringes) used to administer one any of the provided recombinant nucleic acids, recombinant cells, or pharmaceutical compositions to an individual. In some embodiments, a kit can have one or more additional therapeutic agents that can be administered simultaneously or sequentially with the other kit components for a desired purpose, e.g., for modulating an activity of a cell, killing a target cancer cell, or treating a health condition (e.g., disease) in an individual in need thereof.

[0160] Any of the above-described systems and kits can further include one or more additional reagents, where such additional reagents can be selected from: dilution buffers; reconstitution solutions, wash buffers, control reagents, control expression vectors, negative control polypeptides, positive control polypeptides, reagents for in vitro production of the chimeric receptor polypeptides.

[0161] In some embodiments, the components of a system or kit can be in separate containers. In some other embodiments, the components of a system or kit can be combined in a single container.

[0162] In some embodiments, a system or kit can further include instructions for using the components of the kit to practice the methods. The instructions for practicing the methods are generally recorded on a suitable recording medium. For example, the instructions can be printed on a substrate, such as paper or plastic, and the like. The instructions can be present in the kits as a package insert, in the labeling of the container of the kit or components thereof (i.e., associated with the packaging or sub-packaging), and the like. The instructions can be present as an electronic storage data file present on a suitable computer readable storage medium, e.g. CD-ROM, diskette, flash drive, and the like. In some instances, the actual instructions are not present in the kit, but means for obtaining the instructions from a remote source (e.g., via the internet), can be provided. An example of this embodiment is a kit that includes a web address where the instructions can be viewed and/or from which the instructions can be downloaded. As with the instructions, this means for obtaining the instructions can be recorded on a suitable substrate.

[0163] All publications and patent applications mentioned in this disclosure are herein incorporated by reference to the same extent as if each individual publication or patent application was specifically and individually indicated to be incorporated by reference.

[0164] No admission is made that any reference cited herein constitutes prior art. The discussion of the references states what their authors assert, and the inventors reserve the right to challenge the accuracy and pertinence of the cited documents. It will be clearly understood that, although a number of information sources, including scientific journal articles, patent documents, and textbooks, are referred to herein; this reference does not constitute an admission that any of these documents forms part of the common general knowledge in the art.

[0165] The discussion of the general methods given herein is intended for illustrative purposes only. Other alternative methods and alternatives will be apparent to those of skill in the art upon review of this disclosure, and are to be included within the spirit and purview of this application.

### EXAMPLES

[0166] The practice of the present disclosure will employ, unless otherwise indicated, conventional techniques of molecular biology, microbiology, cell biology, biochemistry, nucleic acid chemistry, and immunology, which are well known to those skilled in the art. Such techniques are explained fully in the literature cited above.

[0167] Additional embodiments are disclosed in further detail in the following examples, which are provided by way of illustration and are not in any way intended to limit the scope of this disclosure or the claims.

### EXAMPLE 1

### Generation of Sender Cells

[0168] This Example describes the generation of myelogenous leukemia cells expressing CD19 at levels equivalent toDaudi tumors, for use in activating and testing cells expressing the receptor constructs of the disclosure.

[0169] The cancer cell lines used were K562 myelogenous leukemia cells (ATCC #CCL-243) and Daudi B cell lymphoblasts (ATCC #CCL-213). The K562 cells were lentivirally transduced to stably express human CD19 at levels equivalent to Daudi tumors. CD19 levels were determined by staining the cells with α-CD19 APC (Biolegend® #302212). All cell lines were sorted for expression of the transgenes.

### EXAMPLE 2

### Primary Human T Cell Isolation and Culture

[0170] This Example describes the isolation and culture of primary human T cells that were subsequently used in various cell transduction experiments described in the Examples below.

[0171] In these experiments, primary CD4+ and CD8+ T cells were isolated from blood after apheresis and enriched by negative selection using human T cell isolation kits (human CD4+ or CD8+ enrichment cocktail; STEMCELL Technologies Cat #15062 and 15063). Blood was obtained from Blood Centers of the Pacific (San Francisco, CA) as approved by the University Institutional Review Board. T cells were cryopreserved in growth medium (RPMI-1640, UCSF cell culture core) with 20% human AB serum (Valley Biomedical Inc., #HP1022) and 10% DMSO. After thawing, T cells were cultured in human T cell medium containing X-VIVO^{TM} 15 (Lonza #04-418Q), 5% Human AB serum and 10 mM neutralized N-acetyl L-Cysteine (Sigma-Aldrich #A9165) supplemented with 30 units/mL IL-2 (NCI BRB Preclinical Repository) for all experiments.

### EXAMPLE 3

### Stable Transduction of Human T cells with Lentiviral Vectors

[0172] The Example describes a general protocol used for lentiviral transduction of human T cells.

[0173] Generally, lentiviral vectors pseudo-typed with vesicular stomatitis virus envelope G protein (VSV-G) (pantropic vectors) were produced via transfection of Lenti-X™ 293T cells (Clontech #11131D) with a pHR'SIN:CSW (K.T. Roybal et al., Cell (2016) 167(2):419-32) transgene expression vector and the viral packaging plasmids pCMVdR8.91 and pMD2.G using Mirus TransIT®-Lenti (Mirus, #MIR 6606). Generally, primary T cells were thawed the same day and, after 24 hours in culture, were stimulated with beads having anti-CD3 and anti-CD28 antibodies bound to the surface (Human T-Activator CD3/CD28 Dynabeads®, Life Technologies #11131D) at a 1:3 cell:bead ratio. At 48 hours, viral supernatant was harvested and the primary T cells were exposed to the virus for 24 hours. At Day 5 post T cell stimulation, the beads were removed, and the T cells expanded until Day 14 when they were rested and could be used in assays. T cells were sorted for assays with a Beckton Dickinson (BD Biosciences) FACSAria™ II flow cytometer. AND-gate T cells exhibiting basal CAR expression were gated out during sorting.

### EXAMPLE 4

### Design and Construction of Chimeric Receptor Constructs

[0174] This Example describes the design and construction of a family of synthetic receptors having heterologous STS sequences. Detailed information for various exemplary receptors of the disclosure can be found in Table 1 below.

[0175] Receptors were built by fusing a CD19 scFv to the corresponding receptor scaffold and GAL4 DBD VP64. All receptors contain an N-terminal CD8α signal peptide (SEQ ID NO: 176) for membrane targeting, and a myc-tag (SEQ ID NO: 177) for determining surface expression with an antibody conjugated to a fluorescent dye (α-myc A647®, cell-signaling #2233). The receptors were cloned into a modified pHR'SIN:CSW vector containing a PGK promoter for all primary T cell experiments.

[0176] DNA fragments coding for the amino acid sequences listed in Table 1 were PCR-amplified from either plasmids or synthesized gene fragments containing the corresponding DNA sequences, and assembled using standard cloning techniques (overhang PCR, fusion PCR, and In-fusion cloning) into a lentiviral expression vector (pHR-SIN-pGK, SEQ ID NO: 210) (see, e.g., K.T. Roybal et al., Cell (2016) 167(2):419-32.e16).

[0177] Each plasmid encodes a chimeric receptor with an extracellular domain (ECD, SEQ ID NO: 175) having, from N- to C-terminal, a CD8A signal peptide (MALPVTALLLPLALLLHAARP, SEQ ID NO: 176), a myc-tag (EQKLISEEDL, SEQ ID NO: 177), and an anti- CD19 scFv (D.L. Porter et al., N Engl J Med (2011) 365(8):725-33). C-terminal to the ECD, each chimeric receptor then has a extracellular linking polypeptide selected from the SynNotch JMD including the NRR (SynNotch, SEQ ID NO: 178, plasmids pSTS001 through pSTS072 and pIZ618 through pIZ620); a Mini Notch linking polypeptide excluding the NRR (Mini Notch, SEQ ID NO: 179, plasmids pSTS106 through pSTS172), and a Hinge Notch linking polypeptide (Hinge Notch, SEQ ID NO: 190, pSTS206 through pSTS272). Each of the constructs herein includes a Notch1 TMD (SEQ ID NO: 181), the STS indicated in Table 1, and a Gal4-VP64 transcriptional regulator (ICD, SEQ ID NO: 182).

[0178] Table 1 identifies the plasmid, receptor type, SEQ ID NO: for the full receptor, the selection of linking polypeptide (LP), the STS employed, and the SEQ ID NO: for the STS.

TABLE 1
Chimeric Receptors with Heterologous Stop Transfer Sequence

| | | FULL | | | STS |
|---|---|---|---|---|---|
| Plasmid ID | Receptor | SEQ ID | LP | STS | SEQ ID |
| pSTS00l | SynNotch1 with | 1 | SynNotch1 | RRKK | 100 |
| | APLPI STS | | | | |
| pSTS002 | Human SynNotch1 | 2 | SynNotch1 | RKR | 101 |
| | with APLP2 STS | | | | |
| pSTS003 | Human SynNotch1 | 3 | SynNotch1 | KKK | 102 |
| | with APP STS | | | | |
| pSTS004 | Human SynNotch1 | 4 | SynNotch1 | H | 103 |
| | with TGBR3 STS | | | | |
| pSTS005 | Human SynNotch1 | 5 | SynNotch1 | KYKQKPK | 104 |
| | with CSF1R STS | | | | |
| pSTS006 | Human SynNotch1 | 6 | SynNotch1 | KRRR | 105 |
| | with CXCL16 STS | | | | |
| pSTS007 | Human SynNotch1 | 7 | SynNotch1 | RK | 106 |
| | with CX3CL1 STS | | | | |
| pSTS008 | Human SynNotch1 | 8 | SynNotch1 | RKKRKGK | 107 |
| | with DAG1 STS | | | | |
| pSTS009 | Human SynNotch1 | 9 | SynNotch1 | RR | 108 |
| | with DCC STS | | | | |
| pSTS010 | Human SynNotch1 | 10 | SynNotch1 | RISR | 109 |
| | with DNER STS | | | | |
| pSTS011 | Human SynNotch1 | 11 | SynNotch1 | KCGKGAK | 110 |
| | with DSG2 STS | | | | |
| pSTS012 | Human SynNotch1 | 12 | SynNotch1 | RRR | 111 |
| | with CDH1 STS | | | | |
| pSTS013 | Human SynNotch1 | 13 | SynNotch1 | KQQRIK | 112 |
| | with GHR STS | | | | |
| pSTS014 | Human SynNotch1 | 14 | SynNotch1 | RRK | 113 |
| | with HLA-A STS | | | | |
| pSTS015 | Human SynNotch1 | 15 | SynNotch1 | K | 114 |
| | with IFNAR2 STS | | | | |
| pSTS016 | Human SynNotch1 | 16 | SynNotch1 | HRKR | 115 |
| | with IGFIR STS | | | | |
| pSTS017 | Human SynNotch1 | 17 | SynNotch1 | KIFK | 116 |
| | with IL1R1 STS | | | | |
| pSTS018 | Human SynNotch1 | 18 | SynNotch1 | R | 117 |
| | with ERN2 STS | | | | |
| pSTS019 | Human SynNotch1 | 19 | SynNotch1 | RSKKLEH | 118 |
| | with KCNEl STS | | | | |
| pSTS020 | Human SynNotch1 | 20 | SynNotch1 | KSKRREH | 119 |
| | with KCNE2 STS | | | | |
| pSTS021 | Human SynNotch1 | 21 | SynNotch1 | KRNRGGK | 120 |
| | with CHLI STS | | | | |
| pSTS022 | Human SynNotch1 | 22 | SynNotch1 | KRR | 121 |
| | with LRPI STS | | | | |
| pSTS023 | Human SynNotch1 | 23 | SynNotch1 | HYRR | 122 |
| | with LRP2 STS | | | | |
| pSTS024 | Human SynNotch1 | 24 | SynNotch1 | KRKRTH | 123 |
| | with PTPRF STS | | | | |
| pSTS025 | Human SynNotch1 | 25 | SynNotch1 | KK | 124 |
| | with SCNIB STS | | | | |
| pSTS026 | Human SynNotch1 | 26 | SynNotch1 | RKVSK | 125 |
| | with SCN3B STS | | | | |
| pSTS027 | Human SynNotch1 | 27 | SynNotch1 | RKKYR | 126 |
| | with NPR3 STS | | | | |
| pSTS028 | Human SynNotch1 | 28 | SynNotch1 | KR | 127 |
| | with NGFR STS | | | | |
| pSTS029 | Human SynNotch1 | 29 | SynNotch1 | HH | 128 |
| | with PLXDC2 STS | | | | |
| pSTS030 | Human SynNotch1 | 30 | SynNotch1 | RWKKSR | 129 |
| | with PAM STS | | | | |
| pSTS031 | Human SynNotch1 | 31 | SynNotch1 | RRQRR | 130 |
| | with AGER STS | | | | |
| pSTS032 | Human SynNotch1 | 32 | SynNotch1 | RHRKKR | 131 |
| | with ROBO1 STS | | | | |
| pSTS033 | Human SynNotch1 | 33 | SynNotch1 | KRK | 132 |
| | with SORCS3 STS | | | | |
| pSTS034 | Human SynNotch1 | 34 | SynNotch1 | KFKRR | 133 |
| | with SORCS1 STS | | | | |
| pSTS035 | Human SynNotch1 | 35 | SynNotch1 | KHRR | 134 |
| | with SORL1 STS | | | | |
| pSTS036 | Human SynNotch1 | 36 | SynNotch1 | RMKKK | 135 |
| | with SDC1 STS | | | | |
| pSTS037 | Human SynNotch1 | 37 | SynNotch1 | RMRKK | 136 |
| | with SDC2 STS | | | | |
| pSTS038 | Human SynNotch1 | 38 | SynNotch1 | RRRQKRR | 137 |
| | with SPN STS | | | | |
| pSTS039 | Human SynNotch1 | 39 | SynNotch1 | RHKRK | 138 |
| | with TYR STS | | | | |
| pSTS040 | Human SynNotch1 | 40 | SynNotch1 | RARR | 139 |
| | with TYRP1 STS | | | | |
| pSTS041 | Human SynNotch1 | 41 | SynNotch1 | RRLRK | 140 |
| | with DCT STS | | | | |
| pSTS042 | Human SynNotch1 | 42 | SynNotch1 | RRGR | 141 |
| | with VASN STS | | | | |
| pSTS043 | Human SynNotch1 | 43 | SynNotch1 | RKMKR | 142 |
| | with FLT1 STS | | | | |
| pSTS044 | Human SynNotch1 | 44 | SynNotch1 | RRRLRKQARAHGK | 143 |
| | with CDH5 STS | | | | |
| pSTS045 | Human SynNotch1 | 45 | SynNotch1 | KRSKSRKTK | 144 |
| | with PKHD1 STS | | | | |
| pSTS046 | Human SynNotch1 | 46 | SynNotch1 | RRRRHTFK | 145 |
| | with NECTIN1 STS | | | | |
| pSTS047 | Human SynNotch1 | 47 | SynNotch1 | KKGRRSYK | 146 |
| | with KL STS | | | | |
| pSTS048 | Human SynNotch1 | 48 | SynNotch1 | RFKKTWKLRAL- | 147 |
| | with IL6R STS | | | KEGK | |
| pSTS049 | Human SynNotch1 | 49 | SynNotch1 | I<LRI<RHRI<H | 148 |
| | with EFNBI STS | | | | |
| pSTS050 | Human SynNotch1 | 50 | SynNotch1 | RRRCGQKKK | 149 |
| | with CD44 STS | | | | |
| pSTS051 | Human SynNotch1 | 51 | SynNotch1 | RIRAAHRRTMR | 150 |
| | with CLSTN1 STS | | | | |
| pSTS052 | Human SynNotch1 | 52 | SynNotch1 | RNWKRKNTK | 151 |
| | with LRP8 STS | | | | |
| pSTS053 | Human SynNotch1 | 53 | SynNotch1 | KVYKWKQSR | 152 |
| | with PCDHGC3 STS | | | | |
| pSTS054 | Human SynNotch1 | 54 | SynNotch1 | KTKKQRKKLHDRLR | 153 |
| | with NRG1 STS | | | | |
| pSTS055 | Human SynNotch1 | 55 | SynNotch1 | KRKRRTKTIRR | 154 |
| | with LRP1B STS | | | | |
| pSTS056 | Human SynNotch1 | 56 | SynNotch1 | RKRRKERERSRLPR | 155 |
| | with JAG2 STS | | | | |
| pSTS057 | Human SynNotch1 | 57 | SynNotch1 | KYRRRHRKH | 156 |
| | with EFNB2 STS | | | | |
| pSTS058 | Human SynNotch1 | 58 | SynNotch1 | RLRLQKHR | 157 |
| | with DLL1 STS | | | | |
| pSTS059 | Human SynNotch1 | 59 | SynNotch1 | RVRIAHQH | 158 |
| | with CLSTN2 STS | | | | |
| pSTS060 | Human SynNotch1 | 60 | SynNotch1 | RKKRMAKYEK | 159 |
| | with EPCAM STS | | | | |
| pSTS061 | Human SynNotch1 | 61 | SynNotch1 | RRKSIKKKRALRR | 160 |
| | with ErbB4 STS | | | | |
| pSTS062 | Human SynNotch1 | 62 | SynNotch1 | RSRKVDKR | 161 |
| | with KCNE3 STS | | | | |
| pSTS063 | Human SynNotch1 | 63 | SynNotch1 | KRRDKERQAK | 162 |
| | with CDH2 STS | | | | |
| pSTS064 | Human SynNotch1 | 64 | SynNotch1 | KTKKQRKQ- | 163 |
| | with NRG2 STS | | | MHNHLR | |
| pSTS065 | Human SynNotch1 | 65 | SynNotch1 | KKSKLAKKRK | 164 |
| | with PTPRK STS | | | | |
| pSTS066 | Human SynNotch1 | 66 | SynNotch1 | HPLRKRRKRKKK | 165 |
| | with BTC STS | | | | |
| pSTS067 | Human SynNotch1 | 67 | SynNotch1 | RRRSKYSKAK | 166 |
| | with EPHA4 STS | | | | |
| pSTS068 | Human SynNotch1 | 68 | SynNotch1 | HRRCKHRTGK | 167 |
| | with IL1R2 STS | | | | |
| pSTS069 | Human SynNotch1 | 69 | SynNotch1 | KSKRREKK | 168 |
| | with KCNE4 STS | | | | |
| pSTS070 | Human SynNotch1 | 70 | SynNotch1 | KCVRRKKEQK | 169 |
| | with SCN2B STS | | | | |
| pSTS071 | Human SynNotch1 | 71 | SynNotch1 | KCWRSHKQR | 170 |
| | with Nradd STS | | | | |
| pSTS072 | Human SynNotch1 | 72 | SynNotch1 | KKRKLAKKRK | 171 |
| | with PTPRM STS | | | | |
| pIZ618 | Human SynNotch1 | 73 | SynNotch1 | KRKRKH | 172 |
| | with Notch2 STS | | | | |
| pIZ619 | Human SynNotch1 | 74 | SynNotch1 | RRKREH | 173 |
| | with Notch3 STS | | | | |
| pIZ620 | Human SynNotch1 | 75 | SynNotch1 | RRRRREH | 174 |
| | with Notch4 STS | | | | |
| pSTS106 | miniNotch with | 76 | Mini Notch | KRRR | 105 |
| | CXCL16 STS | | | | |
| pSTS108 | miniNotch with | 77 | Mini Notch | RKKRKGK | 107 |
| | DAG1 STS | | | | |
| pSTS113 | miniNotch with | 78 | Mini Notch | KQQRIK | 112 |
| | GHRSTS | | | | |
| pSTS124 | miniNotch with | 79 | Mini Notch | KRKRTH | 123 |
| | PTPRF STS | | | | |
| pSTS147 | miniNotch with KL | 80 | Mini Notch | KKGRRSYK | 146 |
| | STS | | | | |
| pSTS154 | miniNotch with | 81 | Mini Notch | KTKKQRKKLHDRLR | 153 |
| | NRG1 STS | | | | |
| pSTS155 | miniNotch with | 82 | Mini Notch | KRKRRTKTIRR | 154 |
| | LRP1B STS | | | | |
| pSTS156 | miniNotch with | 83 | Mini Notch | RKRRKERERSRLPR | 155 |
| | JAG2 STS | | | | |
| pSTS160 | miniNotch with | 84 | Mini Notch | RKKRMAKYEK | 159 |
| | EPCAM STS | | | | |
| pSTS164 | miniNotch with | 85 | Mini Notch | KTKKQRKQ- | 163 |
| | NRG2 STS | | | MHNHLR | |
| pSTS165 | miniNotch with | 86 | Mini Notch | KKSKLAKKRK | 164 |
| | PTPRK STS | | | | |
| pSTS172 | miniNotch with | 87 | Mini Notch | KKRKLAKKRK | 171 |
| | PTPRM STS | | | | |
| pSTS206 | HingeNotch with | 88 | Hinge Notch | KRRR | 105 |
| | CXCL16 STS | | | | |
| pSTS208 | HingeNotch with | 89 | Hinge Notch | RKKRKGK | 107 |
| | DAG1 STS | | | | |
| pSTS213 | HingeNotch with | 90 | Hinge Notch | KQQRIK | 112 |
| | GHR STS | | | | |
| pSTS224 | HingeNotch with | 91 | Hinge Notch | KRKRTH | 123 |
| | PTPRF STS | | | | |
| pSTS247 | HingeNotch with | 92 | Hinge Notch | KKGRRSYK | 146 |
| | KLSTS | | | | |
| pSTS254 | HingeNotch with | 93 | Hinge Notch | KTKKQRKKLHDRLR | 153 |
| | NRG1 STS | | | | |
| pSTS255 | HingeNotch with | 94 | Hinge Notch | KRKRRTKTIRR | 154 |
| | LRP1B STS | | | | |
| pSTS256 | HingeNotch with | 95 | Hinge Notch | RKRRKERERSRLPR | 155 |
| | JAG2 STS | | | | |
| pSTS260 | HingeNotch with | 96 | Hinge Notch | RKKRMAKYEK | 159 |
| | EPCAM STS | | | | |
| pSTS264 | HingeNotch with | 97 | Hinge Notch | KTKKQRK- | 163 |
| | NRG2 STS | | | QMHNHLR | |
| pSTS265 | HingeNotch with | 98 | Hinge Notch | KKSKLAKKRK | 164 |
| | PTPRK STS | | | | |
| pSTS272 | HingeNotch with | 99 | Hinge Notch | KKRKLAKKRK | 171 |
| | PTPRM STS | | | | |

[0179] The synthetic receptors were then expressed and assayed for activity as described in the Examples herein. The expression heat map for SynNotch1 receptors is shown in FIG. 3 (receptors are listed below according to their positions in the heat map).

| | | | | | | | | | |
|---|---|---|---|---|---|---|---|---|---|
| APLP1 | DCC | IL1R1 | SCN1B | SORCS3 | DCT | EFNB1 | EFNB2 | PTPRK | Notch2 |
| APLP2 | DNER | ERN2 | SCN3B | SORCS1 | VASN | CD44 | DLL1 | BTC | Notch3 |
| APP | DSG2 | KCNE1 | NPR3 | SORL1 | FLT1 | CLSTN1 | CLSTN2 | EPHA4 | Notch4 |
| TGBR3 | CDH1 | KCNE2 | NGFR | SDC1 | CDH5 | LRP8 | EPCAM | IL1R2 | Notch1 |
| CSF1R | GHR | CHL1 | PLXDC2 | SDC2 | PKHD1 | PCDHGC3 | ErbB4 | KCNE4 | Reporter |
| CXCL16 | HLA-A | LRP1 | PAM | SPN | NECTIN1 | NRG1 | KCNE3 | SCN2B | N/A |
| CX3CL1 | IFNAR2 | LRP2 | AGER | TYR | KL | LRP1B | CDH2 | Nradd | N/A |
| DAG1 | IGF1R | PTPRF | ROBO1 | TYRP1 | IL6R | JAG2 | NRG2 | PTPRM | N/A |

### EXAMPLE 5

### Reporter Expression in Jukat T cells

[0180] This Example describes the generation and screening of reporter Jurkat T cells that were used for the screening of heterologous STSs.

[0181] E6-1 reporter-positive Jurkat T cells (1×10⁵, ATCC# TIB-152) were lentivirally transduced with the receptor variants in 96 well plates. Transduced Jurkat T cells were co-cultured with ligand-expressing K562 cancer cells at a 1:1 ratio in round bottom 96-well tissue culture plates. The cultures were analyzed at 24 hours for surface receptor expression via antibody staining for the extracellular myc-tag and BFP reporter expression with a BD Fortessa X-50. Corrected percent BFP positivity was calculated by dividing the percent BFP-positive for the mixed Jurkat T cell population by the percent myc-positive. A receptor with a given STS was designated as a “hit” if it demonstrated a corrected BFP-positivity of at least 10 percent and a percent myc-positive of at least 5 percent, and “not a hit” if it did not meet both criteria. Functional STS receptor variants, along with a selection of negative hits, were confirmed in human primary T cells using the above protocols. The results are shown in Table 2.

TABLE 2
Results of Heterologous STS Construct Signal Transduction

| | | | STS | |
|---|---|---|---|---|
| Plasmid | Receptor | STS sequence | SEQ ID | Results |
| pSTS001 | SynNotch1 with | RRKK | 100 | Not a Hit: Low Fold-change |
| | APLP1 STS | | | and Low % Change |
| pSTS002 | SynNotch1 with | RKR | 101 | Not a Hit: Low receptor |
| | APLP2 STS | | | expression |
| pSTS003 | SynNotch1 with | KKK | 102 | Not a Hit: Low Fold-change |
| | APP STS | | | and Low % Change |
| pSTS004 | SynNotch1 with | H | 103 | Not a Hit: Low receptor |
| | TGBR3 STS | | | expression |
| pSTS005 | SynNotch1 with | KYKQKPK | 104 | Not a Hit: Low Fold-change |
| | CSF1R STS | | | and Low % Change |
| pSTS006 | SynNotch1 with | KRRR | 105 | Not a Hit: Low % Change |
| | CXCL16 STS | | | |
| pSTS007 | SynNotch1 with | RK | 106 | Not a Hit: Low Fold-change |
| | CX3CL1 STS | | | and Low % Change |
| pSTS008 | SynNotch1 with | RKKRKGK | 107 | Hit |
| | DAG1 STS | | | |
| pSTS009 | SynNotch1 with | RR | 108 | Not a Hit: Low Fold-change |
| | DCC STS | | | and Low % Change |
| pSTS010 | SynNotch1 with | RISR | 109 | Not a Hit: Low Fold-change |
| | DNER STS | | | and Low % Change |
| pSTS011 | SynNotch1 with | KCGKGAK | 110 | Not a Hit: Low Fold-change |
| | DSG2 STS | | | and Low % Change |
| pSTS012 | SynNotch1 with | RRR | ill | Not a Hit: Low receptor |
| | CDH1 STS | | | expression |
| pSTS013 | SynNotch1 with | KQQRIK | 112 | Not a Hit: Low receptor |
| | GHR STS | | | expression |
| pSTS014 | SynNotch1 with | RRK | 113 | Not a Hit: Low Fold-change |
| | HLA-A STS | | | and Low % Change |
| pSTS015 | SynNotch1 with | K | 114 | Not a Hit: Low receptor |
| | IFNAR2 STS | | | expression |
| pSTS016 | SynNotch1 with | HRKR | 115 | Not a Hit: Low Fold-change |
| | IGF1R STS | | | and Low % Change |
| pSTS017 | SynNotch1 with | KIFK | 116 | Not a Hit: Low Fold-change |
| | ILIRI STS | | | and Low % Change |
| pSTS018 | SynNotch1 with | R | 117 | Not a Hit: Low Fold-change |
| | ERN2 STS | | | and Low % Change |
| pSTS019 | SynNotch1 with | RSKKLEH | 118 | Not a Hit: Low Fold-change |
| | KCNE1 STS | | | and Low % Change |
| pSTS020 | SynNotch1 with | KSKRREH | 119 | Not a Hit: Low receptor |
| | KCNE2 STS | | | expression |
| pSTS021 | SynNotch1 with | KRNRGGK | 120 | Not a Hit: Low receptor |
| | CHL1 STS | | | expression |
| pSTS022 | SynNotch1 with | KRR | 121 | Not a Hit: Low % Change |
| | LRP1 STS | | | |
| pSTS023 | SynNotch1 with | HYRR | 122 | Not a Hit: Low Fold-change |
| | LRP2 STS | | | and Low % Change |
| pSTS024 | SynNotch1 with | KRKRTH | 123 | Hit |
| | PTPRF STS | | | |
| pSTS025 | SynNotch1 with | KK | 124 | Not a Hit: Low Fold-change |
| | SCN1B STS | | | and Low % Change |
| pSTS026 | SynNotch1 with | RKVSK | 125 | Not a Hit: Low Fold-change |
| | SCN3B STS | | | and Low % Change |
| pSTS027 | SynNotch1 with | RKKYR | 126 | Not a Hit: Low receptor |
| | NPR3 STS | | | expression |
| pSTS028 | SynNotch1 with | KR | 127 | Not a Hit: Low receptor |
| | NGFR STS | | | expression |
| pSTS029 | SynNotch1 with | HH | 128 | Not a Hit: Low Fold-change |
| | PLXDC2 STS | | | and Low % Change |
| pSTS030 | SynNotch1 with | RWKKSR | 129 | Not a Hit: Low Fold-change |
| | PAM STS | | | and Low % Change |
| pSTS031 | SynNotch1 with | RRQRR | 130 | Not a Hit: Low % Change |
| | AGER STS | | | |
| pSTS032 | SynNotch1 with | RHRKKR | 131 | Not a Hit: Low % Change |
| | ROBO1 STS | | | |
| pSTS033 | SynNotch1 with | KRK | 132 | Not a Hit: Low Fold-change |
| | SORCS3 STS | | | and Low % Change |
| pSTS034 | SynNotch1 with | KFKRR | 133 | Not a Hit: Low Fold-change |
| | SORCS1 STS | | | and Low % Change |
| pSTS035 | SynNotch1 with | KHRR | 134 | Not a Hit: Low receptor |
| | SORL1 STS | | | expression |
| pSTS036 | SynNotch1 with | RMKKK | 135 | Not a Hit: Low Fold-change |
| | SDC1 STS | | | and Low % Change |
| pSTS037 | SynNotch1 with | RMRKK | 136 | Not a Hit: Low receptor |
| | SDC2 STS | | | expression |
| pSTS038 | SynNotch1 with | RRRQKRR | 137 | Not a Hit: Low Fold-change |
| | SPN STS | | | and Low % Change |
| pSTS039 | SynNotch1 with | RHKRK | 138 | Not a Hit: Low Fold-change |
| | TYR STS | | | and Low % Change |
| pSTS040 | SynNotch1 with | RARR | 139 | Not a Hit: Low Fold-change |
| | TYRP1 STS | | | and Low % Change |
| pSTS041 | SynNotch1 with | RRLRK | 140 | Not a Hit: Low Fold-change |
| | DCT STS | | | and Low % Change |
| pSTS042 | SynNotch1 with | RRGR | 141 | Not a Hit: Low receptor |
| | VASN STS | | | expression |
| pSTS043 | SynNotch1 with | RKMKR | 142 | Not a Hit: Low Fold-change |
| | FLTI STS | | | and Low % Change |
| pSTS044 | SynNotch1 with | RRRLRKQARA- | 143 | Hit |
| | CDH5 STS | HGK | | |
| pSTS045 | SynNotch1 with | KRSKSRKTK | 144 | Not a Hit: Low receptor |
| | PKHD1 STS | | | expression |
| pSTS046 | SynNotch1 with | RRRRHTFK | 145 | Not a Hit: Low Fold-change |
| | NECTIN1 STS | | | and Low % Change |
| pSTS047 | SynNotch1 with KL | KKGRRSYK | 146 | Hit |
| | STS | | | |
| pSTS048 | SynNotch1 with | RFKKTWKLRA- | 147 | Not a Hit: Low receptor |
| | IL6R STS | LKEGK | | expression |
| pSTS049 | SynNotch1 with | KLRKRHRKH | 148 | Not a Hit: Low % Change |
| | EFNB1 STS | | | |
| pSTS050 | SynNotch1 with | RRRCGQKKK | 149 | Not a Hit: Low Fold-change |
| | CD44 STS | | | and Low % Change |
| pSTS051 | SynNotch1 with | RIRAAHRRTMR | 150 | Not a Hit: Low Fold-change |
| | CLSTN1 STS | | | and Low % Change |
| pSTS052 | SynNotch1 with | RNWKRKNTK | 151 | Not a Hit: Low Fold-change |
| | LRP8 STS | | | and Low % Change |
| pSTS053 | SynNotch1 with | KVYKWKQSR | 152 | Not a Hit: Low Fold-change |
| | PCDHGC3 STS | | | and Low % Change |
| pSTS054 | SynNotch1 with | KTKKQRKKLH- | 153 | Not a Hit: Low receptor |
| | NRG1 STS | DRLR | | expression |
| pSTS055 | SynNotch1 with | KRKRRTKTIRR | 154 | Hit |
| | LRP1B STS | | | |
| pSTS056 | SynNotch1 with | RKRRKERERS- | 155 | Hit |
| | JAG2 STS | RLPR | | |
| pSTS057 | SynNotch1 with | KYRRRHRKH | 156 | Not a Hit: Low Fold-change |
| | EFNB2 STS | | | and Low % Change |
| pSTS058 | SynNotch1 with | RLRLQKHR | 157 | Not a Hit: Low receptor |
| | DLL1 STS | | | expression |
| pSTS059 | SynNotch1 with | RVRIAHQH | 158 | Not a Hit: Low Fold-change |
| | CLSTN2 STS | | | and Low % Change |
| pSTS060 | SynNotch1 with | RKKRMAKYEK | 159 | Not a Hit: Low receptor |
| | EPCAM STS | | | expression |
| pSTS061 | SynNotch1 with | RRKSIKKKRA- | 160 | Not a Hit: Low receptor |
| | ErbB4 STS | LRR | | expression |
| pSTS062 | SynNotch1 with | RSRKVDKR | 161 | Hit |
| | KCNE3 STS | | | |
| pSTS063 | SynNotch1 with | KRRDKERQAK | 162 | Not a Hit: Low receptor |
| | CDH2 STS | | | expression |
| pSTS064 | SynNotch1 with | KTKKQRKQM- | 163 | Hit |
| | NRG2 STS | HNHLR | | |
| pSTS065 | SynNotch1 with | KKSKLAKKRK | 164 | Hit |
| | PTPRK STS | | | |
| pSTS066 | SynNotch1 with | HPLRKRRKRK- | 165 | Not a Hit: Low Fold-change |
| | BTC STS | KK | | and Low % Change |
| pSTS067 | SynNotch1 with | RRRSKYSKAK | 166 | Hit |
| | EPHA4 STS | | | |
| pSTS068 | SynNotch1 with | HRRCKHRTGK | 167 | Not a Hit: Low receptor |
| | IL1R2 STS | | | expression |
| pSTS069 | SynNotch1 with | KSKRREKK | 168 | Not a Hit: Low receptor |
| | KCNE4 STS | | | expression |
| pSTS070 | SynNotch1 with | KCVRRKKEQK | 169 | Not a Hit: Low % Change |
| | SCN2B STS | | | |
| pSTS071 | SynNotch1 with | KCWRSHKQR | 170 | Not a Hit: Low Fold-change |
| | Nradd STS | | | and Low % Change |
| pSTS072 | SynNotch1 with | KKRKLAKKRK | 171 | Hit |
| | PTPRM STS | | | |
| pIZ618 | SynNotch1 with | KRKRKH | 172 | Hit |
| | Notch2 STS | | | |
| pIZ619 | SynNotch1 with | RRKREH | 173 | Not a Hit: Low % Change |
| | Notch3 STS | | | |
| pIZ620 | SynNotch1 with | RRRRREH | 174 | Hit |
| | Notch4 STS | | | |
| pSTS106 | miniNotch with | KRRR | 105 | 2:1 Signal to Noise with 52% |
| | CXCL16 STS | | | BFP+ |
| pSTS108 | miniNotch with | RKKRKGK | 107 | (not done) |
| | DAG1 STS | | | |
| pSTS113 | miniNotch with | KQQRIK | 112 | 6.5:5.5 Signal to Noise with |
| | GHR STS | | | 64% BFP+, Poor S:N |
| pSTS124 | miniNotchwith | KRKRTH | 123 | (not done) |
| | PTPRF STS | | | |
| pSTS147 | miniNotch with KL | KKGRRSYK | 146 | (not done) |
| | STS | | | |
| pSTS154 | miniNotch with | KTKKQRKKLH- | 153 | 4:1 Signal to Noise with 42% |
| | NRG1 STS | DRLR | | BFP+ |
| pSTS155 | miniNotch with | KRKRRTKTIRR | 154 | 4:1 Signal to Noise with 64% |
| | LRPIB STS | | | BFP+ |
| pSTS156 | miniNotch with | RKRRKERERS- | 155 | 2.4:1 Signal to Noise with |
| | JAG2 STS | RLPR | | 62% BFP+ |
| pSTS160 | miniNotch with | RKKRMAKYEK | 159 | 1:1 Signal to Noise with 80% |
| | EPCAM STS | | | BFP+ Poor S:N |
| pSTS164 | miniNotch with | KTKKQRKQM- | 163 | 2.5:1 Signal to Noise with |
| | NRG2 STS | HNHLR | | 59% BFP+ |
| pSTS165 | miniNotch with | KKSKLAKKRK | 164 | 7:6 Signal to Noise with 72% |
| | PTPRK STS | | | BFP+ |
| pSTS172 | miniNotch with | KKRKLAKKRK | 171 | 3:2 Signal to Noise with 65% |
| | PTPRM STS | | | BFP+ |
| pSTS206 | HingeNotch with | KRRR | 105 | 50:1 Signal to Noise with |
| | CXCL16 STS | | | 31% BFP+ |
| pSTS208 | HingeNotch with | RKKRKGK | 107 | 3:1 Signal to Noise with 60% |
| | DAG1 STS | | | BFP+, Poor S:N for HingeNotch |
| pSTS213 | HingeNotch with | KQQRIK | 112 | 2:1 Signal to Noise with 21% |
| | GHR STS | | | BFP+, Poor S:N |
| pSTS224 | HingeNotch with | KRKRTH | 123 | 82:1 Signal to Noise with |
| | PTPRF STS | | | 58% BFP+ |
| pSTS247 | HingeNotch with KL | KKGRRSYK | 146 | 5:1 Signal to Noise with 67% |
| | STS | | | BFP+, Poor S:N for HingeNotch |
| pSTS254 | HingeNotch with | KTKKQRKKLH- | 153 | 85:1 Signal to Noise with |
| | NRG1 STS | DRLR | | 26% BFP+, |
| pSTS255 | HingeNotch with | KRKRRTKTIRR | 154 | 66:1 Signal to Noise with |
| | LRPIB STS | | | 53% BFP+, |
| pSTS256 | HingeNotch with | RKRRKERERS- | 155 | 49:1 Signal to Noise with |
| | JAG2 STS | RLPR | | 49% BFP+, |
| pSTS260 | HingeNotch with | RKKRMAKYEK | 159 | 2:1 Signal to Noise with 62% |
| | EPCAM STS | | | BFP+, PoorS:N |
| pSTS264 | HingeNotch with | KTKKQRKQM- | 163 | 75:1 Signal to Noise with |
| | NRG2 STS | HNHLR | | 45% BFP+, |
| pSTS265 | HingeNotch with | KKSKLAKKRK | 164 | 4.5:1 Signal to Noise with |
| | PTPRK STS | | | 47% BFP+, Poor S:N for |
| | | | | HingeNotch |
| pSTS272 | HingeNotch with | KKRKLAKKRK | 171 | 8:1 Signal to Noise with 39% |
| | PTPRM STS | | | BFP+, Poor S:N for |
| | | | | HingeNotch |

[0182] The results for SynNotch receptors are also shown in FIG. 5. Results for Hinge Notch receptors are shown in FIGS. 6B and 6C. Results for Mini Notch receptors are shown in FIGS. 7B and 7C. The results demonstrate that a variety of different STS sequences can be used in synthetic receptors of the disclosure, and that the choice of STS affects the expression response and signal to noise ratio of the receptor. This provides a palette of response characteristics that is of use to the synthetic receptor designer.

### EXAMPLE 6

### Comparison of Receptors Having a Notch1 or Notch2 STS

[0183] This experiment demonstrates the effect of using a heterologous Notch1 or Notch2 STS or TMD in a Mini Notch receptor.

[0184] Three Mini Notch receptors were constructed: miniNotch(2,2,2) (SEQ ID NO: 199), having a Notch2 JMD with the NRR deleted (SEQ ID NO: 183), a Notch2 TMD (SEQ ID NO: 206), and a Notch2 STS (SEQ ID NO: 172); miniNotch(2,1,1) (SEQ ID NO: 200), having a Notch2 JMD with the NRR deleted (SEQ ID NO: 183), a Notch1 TMD (SEQ ID NO: 181), and a Notch1 STS (SEQ ID NO: 207); and miniNotch(2,1,2) (SEQ ID NO: 201), having a Notch2 JMD with the NRR deleted (SEQ ID NO: 183), a Notch1 TMD (SEQ ID NO: 181), and a Notch2 STS (SEQ ID NO: 172). Jurkat cells were transduced using a lentiviral vector as described in the Examples above.

[0185] Expression of BFP was measured in the transduced Jurkat cells was measured (a) in the absence of sender cells, (b) in the presence of K562 sender cells without CD19, and (c) in the presence of K562 sender cells expressing CD19.

[0186] The results showed that miniNotch(2,2,2) was relatively noisy, demonstrating an expression level of greater than 50% in the absence of ligand, with relatively high expression in the presence of ligand. The second receptor, miniNotch(2,1,1) was very quiet, demonstrating an undetectable expression level in the absence of ligand, with relatively high expression in the presence of ligand (although less than the stimulated expression of miniNotch(2,2,2)). The third receptor, miniNotch(2,1,2) was intermediate in noise between miniNotch(2,2,2) and miniNotch(2,1,1), and equal in expression to miniNotch(2,2,2).

### EXAMPLE 7

### Further Comparison

[0187] Additional receptors with different linking sequences were constructed for further comparison.

[0188] The following constructs were prepared: SynNotch(1,1,1) (SEQ ID NO: 202), having a Notch1 STS (SEQ ID NO: 207); SynNotch(1,1,2) (SEQ ID NO: 203), having a Notch2 STS (SEQ ID NO: 172); miniNotch(1,1,1) (SEQ ID NO: 208), having a Notch1 STS (SEQ ID NO: 207); miniNotch(1,1,2) (SEQ ID NO: 209), having a Notch2 STS (SEQ ID NO: 172); truncHingeNotchNotch (SEQ ID NO: 204), having a Notch1 STS (SEQ ID NO: 207); and truncHingeNotchNotch(N2 STS) (SEQ ID NO: 205), having a Notch2 STS (SEQ ID NO: 172). The constructs were transduced into Jurkat cells and assayed as described above.

[0189] The results are shown in FIG. 8. SynNotch(1,1,2) was slightly noisier, but provided much higher expression than SynNotch(1,1,1). MiniNotch(1,1,1) was somewhat noisier than the first two receptors, but also achieved still higher expression. MiniNotch(1,1,2) was noisier than the first three receptors, but provided the highest expression level when stimulated. The fifth receptor, truncHingeNotch exhibited a noise level less than SynNotch(1,1,2), with an equivalent stimulated expression level. The last receptor, truncHingeNotch(N2 STS) provided an expression level second only to the MiniNotch(1,1,2), with a much lower noise level.

### EXAMPLE 8

[0190] This Example describes experiments performed to demonstrate activation of Hinge-Notch constructs with different ligand-binding domains and their dependence on proteolytic activity of ADAM proteases and gamma-secretase.

[0191] Three exemplary Hinge-Notch constructs were prepared, including one construct having an anti-CD19 scFv as the ligand recognition domain and a Notch2 STS domain, another construct having an anti-LaG17 nanobody as the ligand recognition domain and a Notch2 STS domain, and a third construct having an eGFP extracellular domain and a Notch1 STS domain. Primary human CD4+ T-cells were activated with anti-CD3/anti-CD28 Dynabeads (Gibco) and transduced with two lentiviral constructs, one expressing a hinge receptor with indicated binding head truncation variant receptor, and the other a transcriptional reporter (FIG. 9). Cells containing both constructs were sorted on Day 5 post initial T-cell stimulation and expanded further for activation testing. For testing, 1×10⁵ double positive T-cells expressing receptors were co-cultured with 1×10⁵ K562 cells (top trace), 1×10⁵ Ligand+K562 cells (second trace from top), 1×10⁵ Ligand+K562 cells with an ADAM10 inhibitor (third trace from top), or 1×10⁵ Ligand+K562 cells with a gamma-secretase inhibitor, DAPT (bottom trace). Transcriptional activation of an inducible BFP reporter gene was subsequently measured using a Fortessa X-50 (BD Biosciences).

### EXAMPLE 9

[0192] This Example describes experiments performed to compare activation of Hinge-Notch variants with different promoters and STS domains. For testing, 1×10⁵ double positive T-cells expressing anti-CD19 receptors were co-cultured with no additions (top trace), 1×10⁵ ALPPL2+ K562 cells (second trace from top), 1×10⁵ CD19+ K562 cells (third trace from top), or 1×10⁵ ALPPL2+ CD19+ K562 cells (bottom trace) (FIG. 10). Transcriptional activation of an inducible BFP reporter gene was subsequently measured using a Fortessa X-50 (BD Biosciences). Activation using murine and human original synNotch constructs were included for comparison.

### EXAMPLE 10

[0193] This Example describes Table 3 of activation characteristics of HingeNotch STS variants without additional T cell stimulation.

[0194] Primary human CD4+ T-cells were activated with anti-CD3/anti-CD28 Dynabeads (Gibco) and transduced with two lentiviral constructs, one expressing a hinge receptor, and the other a transcriptional reporter with constitutive eGFP-tagged anti-ALPPL2 CAR expression. Cells containing both constructs were sorted for Day 5 post initial T-cell stimulation and expanded further for activation testing. For testing, T-cells expressing receptors were co-cultured with K562 cells or CD19+ K562 cells. BFP reporter gene was subsequently measured using a Fortessa X-50 (BD Biosciences). Signal to noise ratios from the MFIs of BFP+ cells under CD19+ K562 versus K562 conditions are plotted against the delta change in MFI in the two conditions, as in Table 3 below.

TABLE 3
This table provides data without stimulation of co-expressed
anti-ALPPL2 CAR with ALPPL2+ K562. “Reporter alone” represents
a reporter plasmid and was expressed in all samples.

| | | | | Average MFI |
|---|---|---|---|---|
| | Recptor from | | | Difference |
| Plasmid | which STS is | | Average Signal | (MFI of ON- |
| ID | derived | STS Sequence | To Noise | MFI of OFF) |
| pIZ343 | Notch 1 | RKRRR (SEQ ID NO: 207) | 20.55472264 | 889.5 |
| pIZ361 | Notch 2 | KRKRKH (SEQ ID NO: 172) | 5.236923077 | 1259 |
| pIZ364 | Notch 4 | RRRREH (SEQ ID NO: 174) | 10.30799476 | 1020 |
| pSTS205 | CSF1R | KYKQKPK (SEQ ID NO: 104) | 3.093253968 | 801 |
| pSTS206 | CXCL16 | KRRR (SEQ ID NO: 105) | 14.3580786 | 1286.5 |
| pSTS208 | DAG1 | RKKRKGK (SEQ ID NO: 107) | 2.823255814 | 2519 |
| pSTS213 | GHR | KQQRIK (SEQ ID NO: 112) | 2.216494845 | 141 |
| pSTS224 | PTPRF | KRKRTH (SEQ ID NO: 123) | 10.48407643 | 1178 |
| pSTS231 | AGER | RRQRR (SEQ ID NO: 130) | 11.92390524 | 1132.5 |
| pSTS247 | KL | KKGRRSYK (SEQ ID NO: 146) | 3.723350254 | 880 |
| pSTS254 | NRG1 | KTKKQRKKLHDRLR (SEQ ID NO: 153) | 9.416666667 | 806.5 |
| pSTS255 | LRP1B | KRKRRTKTIRR (SEQ ID NO: 154) | 2.315500686 | 1014 |
| pSTS256 | Jag2 | RKRRKERERSRLPR (SEQ ID NO: 155) | 5.090909091 | 1323 |
| pSTS260 | EPCAM | RKKRMAKYEK (SEQ ID NO: 159) | 1.640226629 | 864 |
| pSTS262 | KCNE3 | RSRKVDKR (SEQ ID NO: 161) | 9.779546846 | 976 |
| pSTS263 | CDH2 | KRRDKERQAK (SEQ ID NO: 162) | 2.262402089 | 1134 |
| pSTS264 | NRG2 | KTKKQRKQMHNHLR (SEQ ID NO: 163) | 8.322951605 | 1259 |
| pSTS265 | PTPRK | KKSKLAKKRK (SEQ ID NO: 164) | 2.375 | 1248 |
| pSTS266 | BTC | HPLRKRRKRKKK (SEQ ID NO: 165) | 1.232854864 | 480 |
| pSTS267 | EPHA3 | RRRSKYSKAK (SEQ ID NO: 166) | 2.969369369 | 1289.5 |
| pSTS268 | IL1R2 | HRRCKHRTGK (SEQ ID NO: 167) | 2.413043478 | 980 |
| pSTS272 | PTPRM | KKRKLAKKRK (SEQ ID NO: 171) | 2.305630027 | 1317 |
| pSTS274 | Notch3 | RRKREH (SEQ ID NO: 173) | 12.84705882 | 1191 |
| pIZ060 | Reporter Alone | N/A | 0.408 | 114 |

### EXAMPLE 11

[0195] This Example describes Table 4 of activation characteristics of HingeNotch STS variants with T cell stimulation.

[0196] Primary human CD4+ T-cells were activated with anti-CD3/anti-CD28 Dynabeads (Gibco) and transduced with two lentiviral constructs, one expressing a hinge receptor, and the other a transcriptional reporter with constitutive eGFP+ anti-ALPPL2 CAR expression. Cells containing both constructs were sorted for Day 5 post initial T-cell stimulation and expanded further for activation testing. For testing, T-cells expressing receptors were co-cultured with K562 cells or CD19+ K562 cells. BFP reporter gene was subsequently measured using a Fortessa X-50 (BD Biosciences). Signal to noise ratios from the MFIs of BFP+cells under CD19+ K562 versus K562 conditions are plotted against the delta change in MFI in the two conditions. Activation was examined as in Example 19 but with additional ALPPL2+ K562 co-incubation for CAR activation.

TABLE 4
This table provides data with stimulation of co-expressed anti-ALPPL2
CAR with ALPPL2+ K562. “Reporter alone” represents a reporter plasmid
and was expressed in all samples.

| | | | | Average |
|---|---|---|---|---|
| | Receptor | | | MFI |
| | from which | | Average | Difference |
| Plasmid | STS is | | Signal | (MFI of ON |
| ID | derived | STS Sequence | To Noise | -MFI of OFF) |
| pIZ343 | Notch 1 | RKRRR (SEQ ID NO: 207) | 115.1879699 | 1639.5 |
| pIZ361 | Notch 2 | KRKRKH (SEQ ID NO: 172) | 15.51369863 | 4189 |
| pIZ364 | Notch 4 | RRRREH (SEQ ID NO: 174) | 24.14523449 | 1483 |
| pSTS205 | CSF1R | KYKQKPK (SEQ ID NO: 104) | 5.44982699 | 1512 |
| pSTS206 | CXCL16 | KRRR (SEQ ID NO: 105) | 27.93162393 | 1687.5 |
| pSTS208 | DAG1 | RKKRKGK (SEQ ID NO: 107) | 7.403225806 | 4639 |
| pSTS213 | GHR | KQQRIK (SEQ ID NO: 112) | 2.673553719 | −51.5 |
| pSTS224 | PTPRF | KRKRTH (SEQ ID NO: 123) | 50.78034682 | 2574.5 |
| pSTS231 | AGER | RRQRR (SEQ ID NO: 130) | 105.6603774 | 1792 |
| pSTS247 | KL | KKGRRSYK (SEQ ID NO: 146) | 6.534357661 | 1567.5 |
| pSTS254 | NRG1 | KTKKQRKKLHDRLR (SEQ ID NO: 153) | 24.99036609 | 637 |
| pSTS255 | LRP1B | KRKRRTKTIRR (SEQ ID NO: 154) | 10.30285381 | 2558 |
| pSTS256 | Jag2 | RKRRKERERSRLPR (SEQ ID NO: 155) | 21.38095238 | 3320.5 |
| pSTS260 | EPCAM | RKKRMAKYEK (SEQ ID NO: 159) | 2.48189415 | 2372.5 |
| pSTS262 | KCNE3 | RSRKVDKR (SEQ ID NO: 161) | 62.54752852 | 1900.5 |
| pSTS263 | CDH2 | KRRDKERQAK (SEQ ID NO: 162) | 4.24047619 | 2834 |
| pSTS264 | NRG2 | KTKKQRKQMHNHLR (SEQ ID NO: 163) | 15.82959641 | 2201 |
| pSTS265 | PTPRK | KKSKLAKKRK (SEQ ID NO: 164) | 6.761506276 | 2514.5 |
| pSTS266 | BTC | HPLRKRRKRKKK (SEQ ID NO: 165) | 1.713168188 | 423 |
| pSTS267 | EPHA3 | RRRSKYSKAK (SEQ ID NO: 166) | 6.307971014 | 2274 |
| pSTS268 | IL1R2 | HRRCKHRTGK (SEQ ID NO: 167) | 4.775 | 2027 |
| pSTS272 | PTPRM | KKRKLAKKRK (SEQ ID NO: 171) | 9.289501591 | 2517.5 |
| pSTS274 | Notch3 | RRKREH (SEQ ID NO: 173) | 29.22939068 | 1987.5 |
| pIZ060 | Reporter Alone | N/A | 1.719298246 | 422.5 |

### EXAMPLE 12

[0197] This Example describes mutational analysis for the transmembrane domain (TMD) and the STS domain in Hinge-Notch constructs.

[0198] Four types of exemplary Hinge Notch receptors (SEQ ID NOS: 237-240) were using in this Example, all of which including an anti-CD19 scFv domain, a truncated CD8 Hinge domain, and a Gal4VP64 domain. For choices of STS and TMD domains, the four constructs comprise: CLSTN1 TMD and CLSTN1 STS (SEQ ID NO: 237), CLSTN2 TMD and CLSTN2 STS (SEQ ID NO: 238), CLSTN1 TMD and Notch1 STS (SEQ ID NO: 239), CLSTN2 TMD and Notch1 STS (SEQ ID NO: 240). Primary human CD4+ T-cells were activated with anti-CD3/anti-CD28 Dynabeads (Gibco) and transduced with two lentiviral constructs, one expressing a hinge receptor with TMD/STS combination as indicated, and the other a transcriptional reporter with constitutively expressed anti-ALPPL2 CAR. Cells containing both constructs were sorted for on Day 5 post initial T-cell stimulation and expanded further for activation testing. As shown in FIG. 11, 1×10⁵ double positive T-cells expressing receptors were co-cultured with: 1×10⁵ K562 cells (“-CAR” panels, blue), or 1×10⁵ CD19+K562 cells (“-CAR” panels, red). Similarly, 1×10⁵ double positive T-cells expressing receptors were tested in the presence of CAR activity by co-culture with 1×10⁵ ALPPL2+ K562 cells (“+CAR” panels, blue), or 1×10⁵ ALPPL2+ CD19+ K562 cells (“+CAR” panels, red). Transcriptional activation of an inducible BFP reporter gene was subsequently measured using a Fortessa X-50 (BD Biosciences).

### EXAMPLE 13

[0199] This Example describes experiments performed to demonstrate controlled IL-2 production by T cells engineered Hinge-Notch STS variants.

[0200] FIG. 12A shows a diagram of T cells engineered with Hinge-Notch STS variants to provide ligand-triggered secretion of an engineered cytokine for autocrine and paracrine expansion of T cells. Expression profile of anti-CD19 Hinge-Notch receptors with the indicated STS modifications are shown in FIG. 12B. Primary human T-cells were activated with anti-CD3/anti-CD28 Dynabeads (Gibco) and transduced with two lentiviral constructs, one expressing a CAR against the MCAM antigen, and one expressing a Hinge-Notch receptor with inducible super-IL2 under Gal4-UAS control. Cells containing both constructs were sorted on Day 5 post initial T-cell stimulation and expanded further for activation testing. Receptor expression was determined by anti-myc-tag staining (y-axis).

### EXAMPLE 14

[0201] This Example describes experiments performed to demonstrate that ligand-triggered expression of super-IL2 improves cell viability of CAR-T cells.

[0202] 1×10⁵ double positive T-cells expressing anti-CD19 Hinge-Notch Notch1 STS receptors were co-cultured in media without IL-2, with no K562 cells (top left), with CD19+ K562 cells to trigger Hinge-Notch (top right), with MCAM+ K562 cells to trigger CAR activation (bottom left) or with MCAM+ and CD19+ K562 cells to trigger activation of both receptors (bottom right) (FIG. 13). After 9 days, the proportion of live T cells by forward and side-scatter measurements using a Fortessa X-50 (BD Biosciences) was assessed. Co- activation of both receptors resulted in the most viable cells, followed by Hinge-Notch activation (and subsequent super-IL2 induction), CAR activation alone, and no activation of either receptor.

### EXAMPLE 15

[0203] This Example describes experiments performed to demonstrate tunable proliferation of T cells with STS-variants of Hinge-Notch.

[0204] Primary human T-cells were activated with anti-CD3/anti-CD28 Dynabeads (Gibco) and transduced with two lentiviral constructs, one expressing a CAR against the MCAM antigen, and one expressing a Hinge-Notch receptor with inducible super-IL2 under Gal4-UAS control (the right four panels of FIG. 14). Hinge-Notch receptors containing 3 different STS variants (NRG1, Notch1, and Notch2) were tested against a no Hinge-Notch control. Similarly, primary human T-cells were generated without CAR expression (left panels of FIG. 14). T cells were stained with CellTrace Violet (Invitrogen) according to manufacturer's protocols, co-incubated with CD19+ K562 target cells in media without IL-2 and measured using a Fortessa X-50 (BD Biosciences) at the indicated timepoints to assess proliferation by CTV signal decay.

### EXAMPLE 16

[0205] This Example describes experiments performed to demonstrate tunable secretion of super-IL2 with STS-variants of Hinge-Notch.

[0206] Primary human T-cells were activated with anti-CD3/anti-CD28 Dynabeads (Gibco) and transduced with a lentiviral construct Hinge-Notch receptor with inducible super-IL2 under Gal4-UAS control (FIG. 15A). Hinge-Notch receptors containing 3 different STS variants (NRG1, Notch1, and Notch2) were tested against a no HingeNotch control. T cells were co-incubated with MCAM+ CD19+ K562 cells in media lacking IL-2, and at the indicated timepoints, supernatant IL-2 was measured using the Instant ELISA Kit (Invitrogen) according to manufacturer's protocols with a microplate reader (Tecan). Red dotted line indicates a standard concentration of IL-2 used for culturing T cells. Graded secretion of super-IL2 was achieved by activation of STS-tuned HingeNotch receptors.

[0207] For FIG. 15B, primary human T-cells were generated with an additional lentiviral vector expressing a CAR against MCAM. Enhanced uptake of IL-2 by CAR-expressing cells resulted in loss of supernatant IL2 in CAR-only and NRG1-STS Hinge-Notch T cells. In contrast, greater induction of super-IL2 by Notch1 and Notch2-STS based receptors initially outpaces this uptake, before proliferation and K562 elimination reduces supernatant levels.

### EXAMPLE 17

[0208] This Example describes experiments performed to demonstrate tunable secretion of super-IL2 with STS-variants of Hinge-Notch enhances proliferation of bystander T cells.

[0209] Primary human T-cells were activated with anti-CD3/anti-CD28 Dynabeads (Gibco) and transduced with a lentiviral construct comprising a Hinge-Notch receptor with inducible super-IL2 under Gal4-UAS control (right panels of FIG. 16). HingeNotch receptors containing 3 different STS variants (NRG1, Notch1, and Notch2) were tested against a no HingeNotch control. HingeNotch T cells were co-incubated with “bystander” T cells stained with CellTrace Far Red (Invitrogen) expressing a CAR against MCAM (left panel of FIG. 16) or with no CAR (right panel of FIG. 16). T cells were co-incubated with MCAM+ CD19+ K562 cells in media lacking IL-2, and proliferation of the bystander T cells were assessed by measuring signal decay on a Fortessa X-50 (BD Biosciences). For bystander T cells with and without CAR expression, proliferation was enhanced in graded fashion by STS variants of Hinge-Notch-activated T cells.

### EXAMPLE 18

[0210] This Example describes experiments performed to test single lentiviral vector constructs containing Hinge-Notch receptors CAR circuits.

[0211] Primary human T-cells were activated with anti-CD3/anti-CD28 Dynabeads (Gibco) and transduced with a single lentiviral construct containing constitutively expressed Hinge- Notch receptors with an inducible anti-MCAM CAR cassette under Gal4-UAS control. Cells were sorted for Hinge-Notch receptor expression via myc-tag on Day 5 post initial T-cell stimulation and expanded further for activation testing. Three STS-variants were tested as indicated, with constitutively expressed CAR used as a control (FIG. 17). For testing, 1×10⁵ T cells expressing anti-CD19 receptors were co-cultured with: no additions (upper trace), 5×10⁵ K562 cells (middle trace), or 5×10⁴ CD19+ K562 cells (lower trace). Transcriptional activation of the inducible CAR was subsequently measured by a GFP tag using a Fortessa X-50 (BD Biosciences).

### EXAMPLE 19

[0212] This Example describes experiments performed to demonstrate specific dual antigen target cell killing by T cells engineered with a single lentivector containing a HingeNotch CAR circuit.

[0213] Primary human T-cells were activated with anti-CD3/anti-CD28 Dynabeads (Gibco) and transduced with a single lentiviral construct containing constitutively expressed HingeNotch -receptors with an inducible anti-MCAM CAR cassette under Gal4-UAS control. Cells were sorted for Hinge-Notch receptor expression via myc-tag on Day 5 post initial T-cell stimulation and expanded further for activation testing. Three STS-variants were tested as indicated, with constitutively expressed CAR used as a control. For testing, 1×10⁵ T-cells expressing anti-CD19 receptors were co-cultured with 5×10⁵ MCAM+ K562 cells or 5×10⁴ MCAM+ CD19+ K562 cells. Target cell killing was assessed by forward/side-scatter of the K562 population using a Fortessa X-50 (BD Biosciences). As shown in FIG. 18, Hinge-Notch circuits effectively and specifically clear target cells containing both MCAM+ and CD19+antigens.

### EXAMPLE 20

[0214] This Example describes experiments performed for testing single lentiviral vector constructs containing Hinge-Notch receptors for control of T cell activation and exhaustion.

[0215] Primary human T-cells were activated with anti-CD3/anti-CD28 Dynabeads (Gibco) and transduced with a single lentiviral construct containing constitutively expressed Hinge-Notch receptors with an inducible anti-MCAM CAR cassette under Gal4-UAS control. Cells were sorted for Hinge-Notch receptor expression via myc-tag on Day 5 post initial T-cell stimulation and expanded further for activation testing. Three STS-variants were tested as indicated, with constitutively expressed CAR used as a control. For testing, 1×10⁵ T-cells expressing anti-CD19 receptors were co-cultured with 5×10⁴ CD19+ K562 cells. Transcriptional activation of the inducible CAR was subsequently measured by a GFP tag using a Fortessa X-50 (BD Biosciences) (the left most panel of FIG. 19). T cell activation and exhaustion were measure by expression of CD25 and CD39, respectively (FIG. 19).

### EXAMPLE 21

[0216] This Example describes experiments performed for in vivo testing of Hinge-Notch-to-CAR circuits.

[0217] As shown in FIG. 20, for unilateral tumors, NOD.Cg-Prkd^{scid}Il2rg^{tm1Wjl}/SzJ (NSG) mice were implanted with 1×10⁶ K562-BCMA/CD19 tumor cells subcutaneously on the left flank. For contralateral tumors, NSG mice were implanted with 1×10⁶ K562-BCMA/CD19 tumor cells on the left flank and with 1×10⁶ K562-CD19 tumor cells on the right flank. Four days after tumor implantation, 2.5×10⁶ engineered primary human CD4+ and CD8+ T cells (total of 5×10⁶ T cells) were infused i.v. through tail vein injection. Tumor size was monitored via caliper 2-3 per week and mice were determined to have reached endpoint when tumors measured ≥20 mm For immunophenotypic analysis, tumors and spleens were harvested 10 days post T cell implantation. Tumors were manually minced and digested in RPMI-1640 with 4 mg/ml Collagenase IV (Worthington Biochemical Corporation) and 0.1 mg/ml DNase I (MilliporeSigma) at 37° C. for 30 min and spleens were manually dissociated and subjected to red blood cell lysis (ACK; KD medical). The following antibodies were used: anti-CD45 (2D1, 368516, Biolegend), anti-CD3 (UCHT1, 300464, Biolegend), anti-CD4 (SK3, 563552, BD biosciences), and anti-CD8 (RPA-T8, 563823, BD biosciences). Dead cells were excluded with Draq7 (Abcam). Samples were analyzed using FACSymphony X50 SORP (BD Biosciences) and data was analyzed using FlowJo software (BD Biosciences).

### EXAMPLE 22

[0218] This Example describes the results of experiments as described herein for some exemplary Notch receptors.

TABLE 5

| | | Full-length | |
|---|---|---|---|
| Construct ID | Receptor Description | SEQ ID NO | Experiment Result for Activity |
| pIZ341 | anti-CD19scFv- | 219 | Demonstrated that a full CD8 Hinge is |
| | CD8Hinge-Notch1TMD- | | sufficient as a ligand-sensitive domain. |
| | Notch1 STS-Gal4VP64 | | |
| pIZ343 | anti-CD19scFv- | 204 | Demonstrated that a truncated CD8 Hinge is |
| | CD8Hinge2-Notch1TMD- | | sufficient as a ligand-sensitive domain, better |
| | Notch1 STS -Gal4VP64 | | controlled than pIZ341 or pIZ342. |
| pIZ358 | anti-CD19scFv- | 220 | Demonstrated that other hinge domains |
| | CD28Hinge-Notch1TMD- | | besides CD8 Hinge can be used as ligand- |
| | Notch1 STS -Gal4VP64 | | sensitive domains, activates about as well as a |
| | | | truncated CD8 Hinge. |
| pIZ359 | anti-CD19scFv- | 221 | Demonstrated that other hinge domains |
| | IgG4Hinge-Notch1TMD- | | besides CD8 Hinge can be used as ligand- |
| | Notch1 STS-Gal4VP64 | | sensitive domains. |
| pIZ360 | anti-CD19scFv-OX40- | 222 | Demonstrates that other hinge domains |
| | Notch1TMD-Notch1 STS - | | besides CD8 Hinge can be used as ligand- |
| | Gal4VP64 | | sensitive domains. |
| pIZ361 | anti-CD19scFv- | 205 | Demonstrates that Notch2 STS improves |
| | CD8Hinge2-Notch1TMD- | | signal of receptors that do not contain Notch- |
| | Notch2STS-Gal4VP64 | | based ECDs. |
| pIZ343FYIA | anti-ALPPL2scFv- | 223 | Activated against M28, ALPPL2+ K562. |
| | CD8Hinge2-Notch1TMD- | | |
| | Notch1 STS -Gal4VP64 | | |
| pIZ343eGFP | eGFP-CD8Hinge2- | 224 | Activated against LaG17+ K562. |
| | Notch1TMD-Notch1 STS - | | |
| | Gal4VP64 | | |
| pIZ342 | anti-CD19scFv- | 225 | Demonstrated that a truncated CD8 Hinge is |
| | CD8Hinge1-Notch1TMD- | | sufficient as a ligand-sensitive domain, better |
| | Notch1 STS-Gal4VP64 | | controlled than pIZ341. |
| pIZ362 | anti-CD19scFV- | 226 | Demonstrated that a truncated CD8 Hinge is |
| | CD8Hinge3-Notch1TMD- | | sufficient as a ligand-sensitive domain, |
| | Notch1STS-Gal4VP64 | | weaker than pIZ343. |
| pIZ363 | anti-CD19scFV- | 227 | Demonstrated that a truncated CD8 Hinge is |
| | CD8Hinge4-Notch1TMD- | | sufficient as a ligand-sensitive domain, |
| | Notch1STS-Gal4VP64 | | weaker than pIZ343. |
| pIZ361FYIA | anti-ALPPL2scFv- | 228 | Activated against M28, ALPPL2+ K562. |
| | CD8Hinge2-Notch1TMD- | | |
| | Notch2STS-Gal4VP64 | | |
| pIZ343BCMA | anti-BCMAscFV- | 229 | Activated against BCMA+ K562. |
| | CD8Hinge2-Notch1TMD- | | |
| | Notch1 STS-Gal4VP64 | | |
| pIZ361BCMA | anti-BCMAscFV- | 230 | Activated against BCMA+ K562. |
| | CD8Hinge2-Notch1TMD- | | |
| | Notch2STS-Gal4VP64 | | |
| pIZ343(4D5-8) | anti-Her2scFV_4D5-8- | 231 | Activated against Her2+ SKBR3. |
| | CD8Hinge2-Notch1TMD- | | |
| | Notch1 STS-Gal4VP64 | | |
| pIZ361(4D5-8) | anti-Her2scFV_4D5-8- | 232 | Activated against Her2+ SKBR3. |
| | CD8Hinge2-Notch1TMD- | | |
| | Notch2STS-Gal4VP64 | | |
| pIZ343(4D5-7) | anti-Her2scFV_4D5-7- | 233 | Activated against Her2+ SKBR3. |
| | CD8Hinge2-Notch1TMD- | | |
| | Gal4VP64 | | |
| pIZ361(4D5-7) | anti-Her2scFV_4D5-7- | 234 | Activated against Her2+ SKBR3. |
| | CD8Hinge2-Notch1TMD- | | |
| | Notch2STS-Gal4VP64 | | |
| pRay068A | anti-BCMA_FHVH33- | 235 | Activated against BCMA+ K562. |
| | CD8Hinge2-Notch1TMD- | | |
| | Notch2STS-Gal4VP64 | | |
| pRay068B | anti-BCMA_FHVH33- | 236 | Activated against BCMA+ K562. |
| | CD8Hinge5-Notch1TMD- | | |
| | Notch2STS-Gal4VP64 | | |
| pIZ370 | anti-CD19scFv- | 237 | Activated poorly against CD19+ K562. |
| | CD8Hinge2- | | |
| | CLSTN1TMD- | | |
| | CLSTN1STS-Gal4VP64 | | |
| pIZ371 | antiCD19scFv- | 238 | Activated poorly against CD19+ K562. |
| | CD8Hinge2- | | |
| | CLSTN2TMD- | | |
| | CLSTN2STS-Gal4VP64 | | |
| pTMD201 | antiCD19scFv- | 239 | Activated well against CD19+ K562. |
| | CD8Hinge2- | | |
| | CLSTN1TMD- | | |
| | Notch1STS-Gal4VP64 | | |
| pTMD202 | antiCD19scFv- | 240 | Activated well against CD19+ K562. |
| | CD8Hinge2- | | |
| | CLSTN2TMD- | | |
| | Notch1STS-Gal4VP64 | | |

[0219] While particular alternatives of the present disclosure have been disclosed, it is to be understood that various modifications and combinations are possible and are contemplated within the true spirit and scope of the appended claims. There is no intention, therefore, of limitations to the exact abstract and disclosure herein presented.

SEQUENCE LISTING

| SEQ | | |
|---|---|---|
| ID | Sequence | Description |
| 1 | MALPVTALLLPLALLLHAARPEQKLISEEDLDIQMTQTTSSLSASLGDRVT | pSTS001 |
| | ISCRASQDISKYLNWYQQKPDGTVKLLIYHTSRLHSGVPSRFSGSGSGTD | Human |
| | YSLTISNLEQEDIATYFCQQGNTLPYTFGGGTKLEITGGGGSGGGGSGGG | SynNotch1 |
| | GSEVKLQESGPGLVAPSQSLSVTCTVSGVSLPDYGVSWIRQPPRKGLEWL | with APLP1 |
| | GVIWGSETTYYNSALKSRLTIIKDNSKSQVFLKMNSLQTDDTAIYYCAKH | STS |
| | YYYGGSYAMDYWGQGTSVTVSSILDYSFGGGAGRDIPPPLIEEACELPEC | |
| | QEDAGNKVCSLQCNNHACGWDGGDCSLNFNDPWKNCTQSLQCWKYFS | |
| | DGHCDSQCNSAGCLFDGFDCQRAEGQCNPLYDQYCKDHFSDGHCDQGC | |
| | NSAECEWDGLDCAEHVPERLAAGTLVVVVLMPPEQLRNSSFHFLRELSR | |
| | VLHTNVVFKRDAHGQQMIFPYYGREEELRKHPIKRAAEGWAAPDALLG | |
| | QVKASLLPGGSEGGRRRRELDPMDVRGSIVYLEIDNRQCVQASSQCFQSA | |
| | TDVAAFLGALASLGSLNIPYKIEAVQSETVEPPPPAQLHFMYVAAAAFVL | |
| | LFFVGCGVLLSRRKKMKLLSSIEQACDICRLKKLKCSKEKPKCAKCLKNN | |
| | WECRYSPKTKRSPLTRAHLTEVESRLERLEQLFLLIFPREDLDMILKMDSL | |
| | QDIKALLTGLFVQDNVNKDAVTDRLASVETDMPLTLRQHRISATSSSEES | |
| | SNKGQRQLTVSAAAGGSGGSGGSDALDDFDLDMLGSDALDDFDLDMLG | |
| | SDALDDFDLDMLGSDALDDFDLDMLGS | |
| 2 | MALPVTALLLPLALLLHAARPEQKLISEEDLDIQMTQTTSSLSASLGDRVT | pSTS002 |
| | ISCRASQDISKYLNWYQQKPDGTVKLLIYHTSRLHSGVPSRFSGSGSGTD | Human |
| | YSLTISNLEQEDIATYFCQQGNTLPYTFGGGTKLEITGGGGSGGGGSGGG | SynNotch1 |
| | GSEVKLQESGPGLVAPSQSLSVTCTVSGVSLPDYGVSWIRQPPRKGLEWL | with APLP2 |
| | GVIWGSETTYYNSALKSRLTIIKDNSKSQVFLKMNSLQTDDTAIYYCAKH | STS |
| | YYYGGSYAMDYWGQGTSVTVSSILDYSFGGGAGRDIPPPLIEEACELPEC | |
| | QEDAGNKVCSLQCNNHACGWDGGDCSLNFNDPWKNCTQSLQCWKYFS | |
| | DGHCDSQCNSAGCLFDGFDCQRAEGQCNPLYDQYCKDHFSDGHCDQGC | |
| | NSAECEWDGLDCAEHVPERLAAGTLVVVVLMPPEQLRNSSFHFLRELSR | |
| | VLHTNVVFKRDAHGQQMIFPYYGREEELRKHPIKRAAEGWAAPDALLG | |
| | QVKASLLPGGSEGGRRRRELDPMDVRGSIVYLEIDNRQCVQASSQCFQSA | |
| | TDVAAFLGALASLGSLNIPYKIEAVQSETVEPPPPAQLHFMYVAAAAFVL | |
| | LFFVGCGVLLSRKRMKLLSSIEQACDICRLKKLKCSKEKPKCAKCLKNN | |
| | WECRYSPKTKRSPLTRAHLTEVESRLERLEQLFLLIFPREDLDMILKMDSL | |
| | QDIKALLTGLFVQDNVNKDAVTDRLASVETDMPLTLRQHRISATSSSEES | |
| | SNKGQRQLTVSAAAGGSGGSGGSDALDDFDLDMLGSDALDDFDLDMLG | |
| | SDALDDFDLDMLGSDALDDFDLDMLGS | |
| 3 | MALPVTALLLPLALLLHAARPEQKLISEEDLDIQMTQTTSSLSASLGDRVT | pSTS003 |
| | ISCRASQDISKYLNWYQQKPDGTVKLLIYHTSRLHSGVPSRFSGSGSGTD | Human |
| | YSLTISNLEQEDIATYFCQQGNTLPYTFGGGTKLEITGGGGSGGGGSGGG | SynNotch1 |
| | GSEVKLQESGPGLVAPSQSLSVTCTVSGVSLPDYGVSWIRQPPRKGLEWL | with APP STS |
| | GVIWGSETTYYNSALKSRLTIIKDNSKSQVFLKMNSLQTDDTAIYYCAKH | |
| | YYYGGSYAMDYWGQGTSVTVSSILDYSFGGGAGRDIPPPLIEEACELPEC | |
| | QEDAGNKVCSLQCNNHACGWDGGDCSLNFNDPWKNCTQSLQCWKYFS | |
| | DGHCDSQCNSAGCLFDGFDCQRAEGQCNPLYDQYCKDHFSDGHCDQGC | |
| | NSAECEWDGLDCAEHVPERLAAGTLVVVVLMPPEQLRNSSFHFLRELSR | |
| | VLHTNVVFKRDAHGQQMIFPYYGREEELRKHPIKRAAEGWAAPDALLG | |
| | QVKASLLPGGSEGGRRRRELDPMDVRGSIVYLEIDNRQCVQASSQCFQSA | |
| | TDVAAFLGALASLGSLNIPYKIEAVQSETVEPPPPAQLHFMYVAAAAFVL | |
| | LFFVGCGVLLSKKKMKLLSSIEQACDICRLKKLKCSKEKPKCAKCLKNN | |
| | WECRYSPKTKRSPLTRAHLTEVESRLERLEQLFLLIFPREDLDMILKMDSL | |
| | QDIKALLTGLFVQDNVNKDAVTDRLASVETDMPLTLRQHRISATSSSEES | |
| | SNKGQRQLTVSAAAGGSGGSGGSDALDDFDLDMLGSDALDDFDLDMLG | |
| | SDALDDFDLDMLGSDALDDFDLDMLGS | |
| 4 | MALPVTALLLPLALLLHAARPEQKLISEEDLDIQMTQTTSSLSASLGDRVT | pSTS004 |
| | ISCRASQDISKYLNWYQQKPDGTVKLLIYHTSRLHSGVPSRFSGSGSGTD | Human |
| | YSLTISNLEQEDIATYFCQQGNTLPYTFGGGTKLEITGGGGSGGGGSGGG | SynNotch1 |
| | GSEVKLQESGPGLVAPSQSLSVTCTVSGVSLPDYGVSWIRQPPRKGLEWL | with TGBR3 |
| | GVIWGSETTYYNSALKSRLTIIKDNSKSQVFLKMNSLQTDDTAIYYCAKH | STS |
| | YYYGGSYAMDYWGQGTSVTVSSILDYSFGGGAGRDIPPPLIEEACELPEC | |
| | QEDAGNKVCSLQCNNHACGWDGGDCSLNFNDPWKNCTQSLQCWKYFS | |
| | DGHCDSQCNSAGCLFDGFDCQRAEGQCNPLYDQYCKDHFSDGHCDQGC | |
| | NSAECEWDGLDCAEHVPERLAAGTLVVVVLMPPEQLRNSSFHFLRELSR | |
| | VLHTNVVFKRDAHGQQMIFPYYGREEELRKHPIKRAAEGWAAPDALLG | |
| | QVKASLLPGGSEGGRRRRELDPMDVRGSIVYLEIDNRQCVQASSQCFQSA | |
| | TDVAAFLGALASLGSLNIPYKIEAVQSETVEPPPPAQLHFMYVAAAAFVL | |
| | LFFVGCGVLLSHMKLLSSIEQACDICRLKKLKCSKEKPKCAKCLKNNWE | |
| | CRYSPKTKRSPLTRAHLTEVESRLERLEQLFLLIFPREDLDMILKMDSLQD | |
| | IKALLTGLFVQDNVNKDAVTDRLASVETDMPLTLRQHRISATSSSEESSN | |
| | KGQRQLTVSAAAGGSGGSGGSDALDDFDLDMLGSDALDDFDLDMLGSD | |
| | ALDDFDLDMLGSDALDDFDLDMLGS | |
| 5 | MALPVTALLLPLALLLHAARPEQKLISEEDLDIQMTQTTSSLSASLGDRVT | pSTS005 |
| | ISCRASQDISKYLNWYQQKPDGTVKLLIYHTSRLHSGVPSRFSGSGSGTD | Human |
| | YSLTISNLEQEDIATYFCQQGNTLPYTFGGGTKLEITGGGGSGGGGSGGG | SynNotch1 |
| | GSEVKLQESGPGLVAPSQSLSVTCTVSGVSLPDYGVSWIRQPPRKGLEWL | with CSF1R |
| | GVIWGSETTYYNSALKSRLTIIKDNSKSQVFLKMNSLQTDDTAIYYCAKH | STS |
| | YYYGGSYAMDYWGQGTSVTVSSILDYSFGGGAGRDIPPPLIEEACELPEC | |
| | QEDAGNKVCSLQCNNHACGWDGGDCSLNFNDPWKNCTQSLQCWKYFS | |
| | DGHCDSQCNSAGCLFDGFDCQRAEGQCNPLYDQYCKDHFSDGHCDQGC | |
| | NSAECEWDGLDCAEHVPERLAAGTLVVVVLMPPEQLRNSSFHFLRELSR | |
| | VLHTNVVFKRDAHGQQMIFPYYGREEELRKHPIKRAAEGWAAPDALLG | |
| | QVKASLLPGGSEGGRRRRELDPMDVRGSIVYLEIDNRQCVQASSQCFQSA | |
| | TDVAAFLGALASLGSLNIPYKIEAVQSETVEPPPPAQLHFMYVAAAAFVL | |
| | LFFVGCGVLLSKYKQKPKMKLLSSIEQACDICRLKKLKCSKEKPKCAKCL | |
| | KNNWECRYSPKTKRSPLTRAHLTEVESRLERLEQLFLLIFPREDLDMILK | |
| | MDSLQDIKALLTGLFVQDNVNKDAVTDRLASVETDMPLTLRQHRISATS | |
| | SSEESSNKGQRQLTVSAAAGGSGGSGGSDALDDFDLDMLGSDALDDFDL | |
| | DMLGSDALDDFDLDMLGSDALDDFDLDMLGS | |
| 6 | MALPVTALLLPLALLLHAARPEQKLISEEDLDIQMTQTTSSLSASLGDRVT | pSTS006 |
| | ISCRASQDISKYLNWYQQKPDGTVKLLIYHTSRLHSGVPSRFSGSGSGTD | Human |
| | YSLTISNLEQEDIATYFCQQGNTLPYTFGGGTKLEITGGGGSGGGGSGGG | SynNotch1 |
| | GSEVKLQESGPGLVAPSQSLSVTCTVSGVSLPDYGVSWIRQPPRKGLEWL | with CXCL16 |
| | GVIWGSETTYYNSALKSRLTIIKDNSKSQVFLKMNSLQTDDTAIYYCAKH | STS |
| | YYYGGSYAMDYWGQGTSVTVSSILDYSFGGGAGRDIPPPLIEEACELPEC | |
| | QEDAGNKVCSLQCNNHACGWDGGDCSLNFNDPWKNCTQSLQCWKYFS | |
| | DGHCDSQCNSAGCLFDGFDCQRAEGQCNPLYDQYCKDHFSDGHCDQGC | |
| | NSAECEWDGLDCAEHVPERLAAGTLVVVVLMPPEQLRNSSFHFLRELSR | |
| | VLHTNVVFKRDAHGQQMIFPYYGREEELRKHPIKRAAEGWAAPDALLG | |
| | QVKASLLPGGSEGGRRRRELDPMDVRGSIVYLEIDNRQCVQASSQCFQSA | |
| | TDVAAFLGALASLGSLNIPYKIEAVQSETVEPPPPAQLHFMYVAAAAFVL | |
| | LFFVGCGVLLSKRRRMKLLSSIEQACDICRLKKLKCSKEKPKCAKCLKNN | |
| | WECRYSPKTKRSPLTRAHLTEVESRLERLEQLFLLIFPREDLDMILKMDSL | |
| | QDIKALLTGLFVQDNVNKDAVTDRLASVETDMPLTLRQHRISATSSSEES | |
| | SNKGQRQLTVSAAAGGSGGSGGSDALDDFDLDMLGSDALDDFDLDMLG | |
| | SDALDDFDLDMLGSDALDDFDLDMLGS | |
| 7 | MALPVTALLLPLALLLHAARPEQKLISEEDLDIQMTQTTSSLSASLGDRVT | pSTS007 |
| | ISCRASQDISKYLNWYQQKPDGTVKLLIYHTSRLHSGVPSRFSGSGSGTD | Human |
| | YSLTISNLEQEDIATYFCQQGNTLPYTFGGGTKLEITGGGGSGGGGSGGG | SynNotch1 |
| | GSEVKLQESGPGLVAPSQSLSVTCTVSGVSLPDYGVSWIRQPPRKGLEWL | with CX3CL1 |
| | GVIWGSETTYYNSALKSRLTIIKDNSKSQVFLKMNSLQTDDTAIYYCAKH | STS |
| | YYYGGSYAMDYWGQGTSVTVSSILDYSFGGGAGRDIPPPLIEEACELPEC | |
| | QEDAGNKVCSLQCNNHACGWDGGDCSLNFNDPWKNCTQSLQCWKYFS | |
| | DGHCDSQCNSAGCLFDGFDCQRAEGQCNPLYDQYCKDHFSDGHCDQGC | |
| | NSAECEWDGLDCAEHVPERLAAGTLVVVVLMPPEQLRNSSFHFLRELSR | |
| | VLHTNVVFKRDAHGQQMIFPYYGREEELRKHPIKRAAEGWAAPDALLG | |
| | QVKASLLPGGSEGGRRRRELDPMDVRGSIVYLEIDNRQCVQASSQCFQSA | |
| | TDVAAFLGALASLGSLNIPYKIEAVQSETVEPPPPAQLHFMYVAAAAFVL | |
| | LFFVGCGVLLSRKMKLLSSIEQACDICRLKKLKCSKEKPKCAKCLKNNW | |
| | ECRYSPKTKRSPLTRAHLTEVESRLERLEQLFLLIFPREDLDMILKMDSLQ | |
| | DIKALLTGLFVQDNVNKDAVTDRLASVETDMPLTLRQHRISATSSSEESS | |
| | NKGQRQLTVSAAAGGSGGSGGSDALDDFDLDMLGSDALDDFDLDMLGS | |
| | DALDDFDLDMLGSDALDDFDLDMLGS | |
| 8 | MALPVTALLLPLALLLHAARPEQKLISEEDLDIQMTQTTSSLSASLGDRVT | pSTS008 |
| | ISCRASQDISKYLNWYQQKPDGTVKLLIYHTSRLHSGVPSRFSGSGSGTD | Human |
| | YSLTISNLEQEDIATYFCQQGNTLPYTFGGGTKLEITGGGGSGGGGSGGG | SynNotch1 |
| | GSEVKLQESGPGLVAPSQSLSVTCTVSGVSLPDYGVSWIRQPPRKGLEWL | with DAGI |
| | GVIWGSETTYYNSALKSRLTIIKDNSKSQVFLKMNSLQTDDTAIYYCAKH | STS |
| | YYYGGSYAMDYWGQGTSVTVSSILDYSFGGGAGRDIPPPLIEEACELPEC | |
| | QEDAGNKVCSLQCNNHACGWDGGDCSLNFNDPWKNCTQSLQCWKYFS | |
| | DGHCDSQCNSAGCLFDGFDCQRAEGQCNPLYDQYCKDHFSDGHCDQGC | |
| | NSAECEWDGLDCAEHVPERLAAGTLVVVVLMPPEQLRNSSFHFLRELSR | |
| | VLHTNVVFKRDAHGQQMIFPYYGREEELRKHPIKRAAEGWAAPDALLG | |
| | QVKASLLPGGSEGGRRRRELDPMDVRGSIVYLEIDNRQCVQASSQCFQSA | |
| | TDVAAFLGALASLGSLNIPYKIEAVQSETVEPPPPAQLHFMYVAAAAFVL | |
| | LFFVGCGVLLSRKKRKGKMKLLSSIEQACDICRLKKLKCSKEKPKCAKCL | |
| | KNNWECRYSPKTKRSPLTRAHLTEVESRLERLEQLFLLIFPREDLDMILK | |
| | MDSLQDIKALLTGLFVQDNVNKDAVTDRLASVETDMPLTLRQHRISATS | |
| | SSEESSNKGQRQLTVSAAAGGSGGSGGSDALDDFDLDMLGSDALDDFDL | |
| | DMLGSDALDDFDLDMLGSDALDDFDLDMLGS | |
| 9 | MALPVTALLLPLALLLHAARPEQKLISEEDLDIQMTQTTSSLSASLGDRVT | pSTS009 |
| | ISCRASQDISKYLNWYQQKPDGTVKLLIYHTSRLHSGVPSRFSGSGSGTD | Human |
| | YSLTISNLEQEDIATYFCQQGNTLPYTFGGGTKLEITGGGGSGGGGSGGG | SynNotch1 |
| | GSEVKLQESGPGLVAPSQSLSVTCTVSGVSLPDYGVSWIRQPPRKGLEWL | with DCC STS |
| | GVIWGSETTYYNSALKSRLTIIKDNSKSQVFLKMNSLQTDDTAIYYCAKH | |
| | YYYGGSYAMDYWGQGTSVTVSSILDYSFGGGAGRDIPPPLIEEACELPEC | |
| | QEDAGNKVCSLQCNNHACGWDGGDCSLNFNDPWKNCTQSLQCWKYFS | |
| | DGHCDSQCNSAGCLFDGFDCQRAEGQCNPLYDQYCKDHFSDGHCDQGC | |
| | NSAECEWDGLDCAEHVPERLAAGTLVVVVLMPPEQLRNSSFHFLRELSR | |
| | VLHTNVVFKRDAHGQQMIFPYYGREEELRKHPIKRAAEGWAAPDALLG | |
| | QVKASLLPGGSEGGRRRRELDPMDVRGSIVYLEIDNRQCVQASSQCFQSA | |
| | TDVAAFLGALASLGSLNIPYKIEAVQSETVEPPPPAQLHFMYVAAAAFVL | |
| | LFFVGCGVLLSRRMKLLSSIEQACDICRLKKLKCSKEKPKCAKCLKNNW | |
| | ECRYSPKTKRSPLTRAHLTEVESRLERLEQLFLLIFPREDLDMILKMDSLQ | |
| | DIKALLTGLFVQDNVNKDAVTDRLASVETDMPLTLRQHRISATSSSEESS | |
| | NKGQRQLTVSAAAGGSGGSGGSDALDDFDLDMLGSDALDDFDLDMLGS | |
| | DALDDFDLDMLGSDALDDFDLDMLGS | |
| 10 | MALPVTALLLPLALLLHAARPEQKLISEEDLDIQMTQTTSSLSASLGDRVT | pSTS010 |
| | ISCRASQDISKYLNWYQQKPDGTVKLLIYHTSRLHSGVPSRFSGSGSGTD | Human |
| | YSLTISNLEQEDIATYFCQQGNTLPYTFGGGTKLEITGGGGSGGGGSGGG | SynNotch1 |
| | GSEVKLQESGPGLVAPSQSLSVTCTVSGVSLPDYGVSWIRQPPRKGLEWL | with DNER |
| | GVIWGSETTYYNSALKSRLTIIKDNSKSQVFLKMNSLQTDDTAIYYCAKH | STS |
| | YYYGGSYAMDYWGQGTSVTVSSILDYSFGGGAGRDIPPPLIEEACELPEC | |
| | QEDAGNKVCSLQCNNHACGWDGGDCSLNFNDPWKNCTQSLQCWKYFS | |
| | DGHCDSQCNSAGCLFDGFDCQRAEGQCNPLYDQYCKDHFSDGHCDQGC | |
| | NSAECEWDGLDCAEHVPERLAAGTLVVVVLMPPEQLRNSSFHFLRELSR | |
| | VLHTNVVFKRDAHGQQMIFPYYGREEELRKHPIKRAAEGWAAPDALLG | |
| | QVKASLLPGGSEGGRRRRELDPMDVRGSIVYLEIDNRQCVQASSQCFQSA | |
| | TDVAAFLGALASLGSLNIPYKIEAVQSETVEPPPPAQLHFMYVAAAAFVL | |
| | LFFVGCGVLLSRISRMKLLSSIEQACDICRLKKLKCSKEKPKCAKCLKNN | |
| | WECRYSPKTKRSPLTRAHLTEVESRLERLEQLFLLIFPREDLDMILKMDSL | |
| | QDIKALLTGLFVQDNVNKDAVTDRLASVETDMPLTLRQHRISATSSSEES | |
| | SNKGQRQLTVSAAAGGSGGSGGSDALDDFDLDMLGSDALDDFDLDMLG | |
| | SDALDDFDLDMLGSDALDDFDLDMLGS | |
| 11 | MALPVTALLLPLALLLHAARPEQKLISEEDLDIQMTQTTSSLSASLGDRVT | pSTS011 |
| | ISCRASQDISKYLNWYQQKPDGTVKLLIYHTSRLHSGVPSRFSGSGSGTD | Human |
| | YSLTISNLEQEDIATYFCQQGNTLPYTFGGGTKLEITGGGGSGGGGSGGG | SynNotch1 |
| | GSEVKLQESGPGLVAPSQSLSVTCTVSGVSLPDYGVSWIRQPPRKGLEWL | with DSG2 |
| | GVIWGSETTYYNSALKSRLTIIKDNSKSQVFLKMNSLQTDDTAIYYCAKH | STS |
| | YYYGGSYAMDYWGQGTSVTVSSILDYSFGGGAGRDIPPPLIEEACELPEC | |
| | QEDAGNKVCSLQCNNHACGWDGGDCSLNFNDPWKNCTQSLQCWKYFS | |
| | DGHCDSQCNSAGCLFDGFDCQRAEGQCNPLYDQYCKDHFSDGHCDQGC | |
| | NSAECEWDGLDCAEHVPERLAAGTLVVVVLMPPEQLRNSSFHFLRELSR | |
| | VLHTNVVFKRDAHGQQMIFPYYGREEELRKHPIKRAAEGWAAPDALLG | |
| | QVKASLLPGGSEGGRRRRELDPMDVRGSIVYLEIDNRQCVQASSQCFQSA | |
| | TDVAAFLGALASLGSLNIPYKIEAVQSETVEPPPPAQLHFMYVAAAAFVL | |
| | LFFVGCGVLLSKCGKGAKMKLLSSIEQACDICRLKKLKCSKEKPKCAKCL | |
| | KNNWECRYSPKTKRSPLTRAHLTEVESRLERLEQLFLLIFPREDLDMILK | |
| | MDSLQDIKALLTGLFVQDNVNKDAVTDRLASVETDMPLTLRQHRISATS | |
| | SSEESSNKGQRQLTVSAAAGGSGGSGGSDALDDFDLDMLGSDALDDFDL | |
| | DMLGSDALDDFDLDMLGSDALDDFDLDMLGS | |
| 12 | MALPVTALLLPLALLLHAARPEQKLISEEDLDIQMTQTTSSLSASLGDRVT | pSTS012 |
| | ISCRASQDISKYLNWYQQKPDGTVKLLIYHTSRLHSGVPSRFSGSGSGTD | Human |
| | YSLTISNLEQEDIATYFCQQGNTLPYTFGGGTKLEITGGGGSGGGGSGGG | SynNotch1 |
| | GSEVKLQESGPGLVAPSQSLSVTCTVSGVSLPDYGVSWIRQPPRKGLEWL | with CDH1 |
| | GVIWGSETTYYNSALKSRLTIIKDNSKSQVFLKMNSLQTDDTAIYYCAKH | STS |
| | YYYGGSYAMDYWGQGTSVTVSSILDYSFGGGAGRDIPPPLIEEACELPEC | |
| | QEDAGNKVCSLQCNNHACGWDGGDCSLNFNDPWKNCTQSLQCWKYFS | |
| | DGHCDSQCNSAGCLFDGFDCQRAEGQCNPLYDQYCKDHFSDGHCDQGC | |
| | NSAECEWDGLDCAEHVPERLAAGTLVVVVLMPPEQLRNSSFHFLRELSR | |
| | VLHTNVVFKRDAHGQQMIFPYYGREEELRKHPIKRAAEGWAAPDALLG | |
| | QVKASLLPGGSEGGRRRRELDPMDVRGSIVYLEIDNRQCVQASSQCFQSA | |
| | TDVAAFLGALASLGSLNIPYKIEAVQSETVEPPPPAQLHFMYVAAAAFVL | |
| | LFFVGCGVLLSRRRMKLLSSIEQACDICRLKKLKCSKEKPKCAKCLKNN | |
| | WECRYSPKTKRSPLTRAHLTEVESRLERLEQLFLLIFPREDLDMILKMDSL | |
| | QDIKALLTGLFVQDNVNKDAVTDRLASVETDMPLTLRQHRISATSSSEES | |
| | SNKGQRQLTVSAAAGGSGGSGGSDALDDFDLDMLGSDALDDFDLDMLG | |
| | SDALDDFDLDMLGSDALDDFDLDMLGS | |
| 13 | MALPVTALLLPLALLLHAARPEQKLISEEDLDIQMTQTTSSLSASLGDRVT | pSTS013 |
| | ISCRASQDISKYLNWYQQKPDGTVKLLIYHTSRLHSGVPSRFSGSGSGTD | Human |
| | YSLTISNLEQEDIATYFCQQGNTLPYTFGGGTKLEITGGGGSGGGGSGGG | SynNotch1 |
| | GSEVKLQESGPGLVAPSQSLSVTCTVSGVSLPDYGVSWIRQPPRKGLEWL | with GHR STS |
| | GVIWGSETTYYNSALKSRLTIIKDNSKSQVFLKMNSLQTDDTAIYYCAKH | |
| | YYYGGSYAMDYWGQGTSVTVSSILDYSFGGGAGRDIPPPLIEEACELPEC | |
| | QEDAGNKVCSLQCNNHACGWDGGDCSLNFNDPWKNCTQSLQCWKYFS | |
| | DGHCDSQCNSAGCLFDGFDCQRAEGQCNPLYDQYCKDHFSDGHCDQGC | |
| | NSAECEWDGLDCAEHVPERLAAGTLVVVVLMPPEQLRNSSFHFLRELSR | |
| | VLHTNVVFKRDAHGQQMIFPYYGREEELRKHPIKRAAEGWAAPDALLG | |
| | QVKASLLPGGSEGGRRRRELDPMDVRGSIVYLEIDNRQCVQASSQCFQSA | |
| | TDVAAFLGALASLGSLNIPYKIEAVQSETVEPPPPAQLHFMYVAAAAFVL | |
| | LFFVGCGVLLSKQQRIKMKLLSSIEQACDICRLKKLKCSKEKPKCAKCLK | |
| | NNWECRYSPKTKRSPLTRAHLTEVESRLERLEQLFLLIFPREDLDMILKM | |
| | DSLQDIKALLTGLFVQDNVNKDAVTDRLASVETDMPLTLRQHRISATSSS | |
| | EESSNKGQRQLTVSAAAGGSGGSGGSDALDDFDLDMLGSDALDDFDLD | |
| | MLGSDALDDFDLDMLGSDALDDFDLDMLGS | |
| 14 | MALPVTALLLPLALLLHAARPEQKLISEEDLDIQMTQTTSSLSASLGDRVT | pSTS014 |
| | ISCRASQDISKYLNWYQQKPDGTVKLLIYHTSRLHSGVPSRFSGSGSGTD | Human |
| | YSLTISNLEQEDIATYFCQQGNTLPYTFGGGTKLEITGGGGSGGGGSGGG | SynNotch1 |
| | GSEVKLQESGPGLVAPSQSLSVTCTVSGVSLPDYGVSWIRQPPRKGLEWL | with HLA-A |
| | GVIWGSETTYYNSALKSRLTIIKDNSKSQVFLKMNSLQTDDTAIYYCAKH | STS |
| | YYYGGSYAMDYWGQGTSVTVSSILDYSFGGGAGRDIPPPLIEEACELPEC | |
| | QEDAGNKVCSLQCNNHACGWDGGDCSLNFNDPWKNCTQSLQCWKYFS | |
| | DGHCDSQCNSAGCLFDGFDCQRAEGQCNPLYDQYCKDHFSDGHCDQGC | |
| | NSAECEWDGLDCAEHVPERLAAGTLVVVVLMPPEQLRNSSFHFLRELSR | |
| | VLHTNVVFKRDAHGQQMIFPYYGREEELRKHPIKRAAEGWAAPDALLG | |
| | QVKASLLPGGSEGGRRRRELDPMDVRGSIVYLEIDNRQCVQASSQCFQSA | |
| | TDVAAFLGALASLGSLNIPYKIEAVQSETVEPPPPAQLHFMYVAAAAFVL | |
| | LFFVGCGVLLSRRKMKLLSSIEQACDICRLKKLKCSKEKPKCAKCLKNN | |
| | WECRYSPKTKRSPLTRAHLTEVESRLERLEQLFLLIFPREDLDMILKMDSL | |
| | QDIKALLTGLFVQDNVNKDAVTDRLASVETDMPLTLRQHRISATSSSEES | |
| | SNKGQRQLTVSAAAGGSGGSGGSDALDDFDLDMLGSDALDDFDLDMLG | |
| | SDALDDFDLDMLGSDALDDFDLDMLGS | |
| 15 | MALPVTALLLPLALLLHAARPEQKLISEEDLDIQMTQTTSSLSASLGDRVT | pSTS015 |
| | ISCRASQDISKYLNWYQQKPDGTVKLLIYHTSRLHSGVPSRFSGSGSGTD | Human |
| | YSLTISNLEQEDIATYFCQQGNTLPYTFGGGTKLEITGGGGSGGGGSGGG | SynNotch1 |
| | GSEVKLQESGPGLVAPSQSLSVTCTVSGVSLPDYGVSWIRQPPRKGLEWL | with IFNAR2 |
| | GVIWGSETTYYNSALKSRLTIIKDNSKSQVFLKMNSLQTDDTAIYYCAKH | STS |
| | YYYGGSYAMDYWGQGTSVTVSSILDYSFGGGAGRDIPPPLIEEACELPEC | |
| | QEDAGNKVCSLQCNNHACGWDGGDCSLNFNDPWKNCTQSLQCWKYFS | |
| | DGHCDSQCNSAGCLFDGFDCQRAEGQCNPLYDQYCKDHFSDGHCDQGC | |
| | NSAECEWDGLDCAEHVPERLAAGTLVVVVLMPPEQLRNSSFHFLRELSR | |
| | VLHTNVVFKRDAHGQQMIFPYYGREEELRKHPIKRAAEGWAAPDALLG | |
| | QVKASLLPGGSEGGRRRRELDPMDVRGSIVYLEIDNRQCVQASSQCFQSA | |
| | TDVAAFLGALASLGSLNIPYKIEAVQSETVEPPPPAQLHFMYVAAAAFVL | |
| | LFFVGCGVLLSKMKLLSSIEQACDICRLKKLKCSKEKPKCAKCLKNNWE | |
| | CRYSPKTKRSPLTRAHLTEVESRLERLEQLFLLIFPREDLDMILKMDSLQD | |
| | IKALLTGLFVQDNVNKDAVTDRLASVETDMPLTLRQHRISATSSSEESSN | |
| | KGQRQLTVSAAAGGSGGSGGSDALDDFDLDMLGSDALDDFDLDMLGSD | |
| | ALDDFDLDMLGSDALDDFDLDMLGS | |
| 16 | MALPVTALLLPLALLLHAARPEQKLISEEDLDIQMTQTTSSLSASLGDRVT | pSTS016 |
| | ISCRASQDISKYLNWYQQKPDGTVKLLIYHTSRLHSGVPSRFSGSGSGTD | Human |
| | YSLTISNLEQEDIATYFCQQGNTLPYTFGGGTKLEITGGGGSGGGGSGGG | SynNotch1 |
| | GSEVKLQESGPGLVAPSQSLSVTCTVSGVSLPDYGVSWIRQPPRKGLEWL | with IGFIR |
| | GVIWGSETTYYNSALKSRLTIIKDNSKSQVFLKMNSLQTDDTAIYYCAKH | STS |
| | YYYGGSYAMDYWGQGTSVTVSSILDYSFGGGAGRDIPPPLIEEACELPEC | |
| | QEDAGNKVCSLQCNNHACGWDGGDCSLNFNDPWKNCTQSLQCWKYFS | |
| | DGHCDSQCNSAGCLFDGFDCQRAEGQCNPLYDQYCKDHFSDGHCDQGC | |
| | NSAECEWDGLDCAEHVPERLAAGTLVVVVLMPPEQLRNSSFHFLRELSR | |
| | VLHTNVVFKRDAHGQQMIFPYYGREEELRKHPIKRAAEGWAAPDALLG | |
| | QVKASLLPGGSEGGRRRRELDPMDVRGSIVYLEIDNRQCVQASSQCFQSA | |
| | TDVAAFLGALASLGSLNIPYKIEAVQSETVEPPPPAQLHFMYVAAAAFVL | |
| | LFFVGCGVLLSHRKRMKLLSSIEQACDICRLKKLKCSKEKPKCAKCLKNN | |
| | WECRYSPKTKRSPLTRAHLTEVESRLERLEQLFLLIFPREDLDMILKMDSL | |
| | QDIKALLTGLFVQDNVNKDAVTDRLASVETDMPLTLRQHRISATSSSEES | |
| | SNKGQRQLTVSAAAGGSGGSGGSDALDDFDLDMLGSDALDDFDLDMLG | |
| | SDALDDFDLDMLGSDALDDFDLDMLGS | |
| 17 | MALPVTALLLPLALLLHAARPEQKLISEEDLDIQMTQTTSSLSASLGDRVT | pSTS017 |
| | ISCRASQDISKYLNWYQQKPDGTVKLLIYHTSRLHSGVPSRFSGSGSGTD | Human |
| | YSLTISNLEQEDIATYFCQQGNTLPYTFGGGTKLEITGGGGSGGGGSGGG | SynNotch1 |
| | GSEVKLQESGPGLVAPSQSLSVTCTVSGVSLPDYGVSWIRQPPRKGLEWL | with IL1R1 |
| | GVIWGSETTYYNSALKSRLTIIKDNSKSQVFLKMNSLQTDDTAIYYCAKH | STS |
| | YYYGGSYAMDYWGQGTSVTVSSILDYSFGGGAGRDIPPPLIEEACELPEC | |
| | QEDAGNKVCSLQCNNHACGWDGGDCSLNFNDPWKNCTQSLQCWKYFS | |
| | DGHCDSQCNSAGCLFDGFDCQRAEGQCNPLYDQYCKDHFSDGHCDQGC | |
| | NSAECEWDGLDCAEHVPERLAAGTLVVVVLMPPEQLRNSSFHFLRELSR | |
| | VLHTNVVFKRDAHGQQMIFPYYGREEELRKHPIKRAAEGWAAPDALLG | |
| | QVKASLLPGGSEGGRRRRELDPMDVRGSIVYLEIDNRQCVQASSQCFQSA | |
| | TDVAAFLGALASLGSLNIPYKIEAVQSETVEPPPPAQLHFMYVAAAAFVL | |
| | LFFVGCGVLLSKIFKMKLLSSIEQACDICRLKKLKCSKEKPKCAKCLKNN | |
| | WECRYSPKTKRSPLTRAHLTEVESRLERLEQLFLLIFPREDLDMILKMDSL | |
| | QDIKALLTGLFVQDNVNKDAVTDRLASVETDMPLTLRQHRISATSSSEES | |
| | SNKGQRQLTVSAAAGGSGGSGGSDALDDFDLDMLGSDALDDFDLDMLG | |
| | SDALDDFDLDMLGSDALDDFDLDMLGS | |
| 18 | MALPVTALLLPLALLLHAARPEQKLISEEDLDIQMTQTTSSLSASLGDRVT | pSTS018 |
| | ISCRASQDISKYLNWYQQKPDGTVKLLIYHTSRLHSGVPSRFSGSGSGTD | Human |
| | YSLTISNLEQEDIATYFCQQGNTLPYTFGGGTKLEITGGGGSGGGGSGGG | SynNotch1 |
| | GSEVKLQESGPGLVAPSQSLSVTCTVSGVSLPDYGVSWIRQPPRKGLEWL | with ERN2 |
| | GVIWGSETTYYNSALKSRLTIIKDNSKSQVFLKMNSLQTDDTAIYYCAKH | STS |
| | YYYGGSYAMDYWGQGTSVTVSSILDYSFGGGAGRDIPPPLIEEACELPEC | |
| | QEDAGNKVCSLQCNNHACGWDGGDCSLNFNDPWKNCTQSLQCWKYFS | |
| | DGHCDSQCNSAGCLFDGFDCQRAEGQCNPLYDQYCKDHFSDGHCDQGC | |
| | NSAECEWDGLDCAEHVPERLAAGTLVVVVLMPPEQLRNSSFHFLRELSR | |
| | VLHTNVVFKRDAHGQQMIFPYYGREEELRKHPIKRAAEGWAAPDALLG | |
| | QVKASLLPGGSEGGRRRRELDPMDVRGSIVYLEIDNRQCVQASSQCFQSA | |
| | TDVAAFLGALASLGSLNIPYKIEAVQSETVEPPPPAQLHFMYVAAAAFVL | |
| | LFFVGCGVLLSRMKLLSSIEQACDICRLKKLKCSKEKPKCAKCLKNNWE | |
| | CRYSPKTKRSPLTRAHLTEVESRLERLEQLFLLIFPREDLDMILKMDSLQD | |
| | IKALLTGLFVQDNVNKDAVTDRLASVETDMPLTLRQHRISATSSSEESSN | |
| | KGQRQLTVSAAAGGSGGSGGSDALDDFDLDMLGSDALDDFDLDMLGSD | |
| | ALDDFDLDMLGSDALDDFDLDMLGS | |
| 19 | MALPVTALLLPLALLLHAARPEQKLISEEDLDIQMTQTTSSLSASLGDRVT | pSTS019 |
| | ISCRASQDISKYLNWYQQKPDGTVKLLIYHTSRLHSGVPSRFSGSGSGTD | Human |
| | YSLTISNLEQEDIATYFCQQGNTLPYTFGGGTKLEITGGGGSGGGGSGGG | SynNotch1 |
| | GSEVKLQESGPGLVAPSQSLSVTCTVSGVSLPDYGVSWIRQPPRKGLEWL | with KCNE1 |
| | GVIWGSETTYYNSALKSRLTIIKDNSKSQVFLKMNSLQTDDTAIYYCAKH | STS |
| | YYYGGSYAMDYWGQGTSVTVSSILDYSFGGGAGRDIPPPLIEEACELPEC | |
| | QEDAGNKVCSLQCNNHACGWDGGDCSLNFNDPWKNCTQSLQCWKYFS | |
| | DGHCDSQCNSAGCLFDGFDCQRAEGQCNPLYDQYCKDHFSDGHCDQGC | |
| | NSAECEWDGLDCAEHVPERLAAGTLVVVVLMPPEQLRNSSFHFLRELSR | |
| | VLHTNVVFKRDAHGQQMIFPYYGREEELRKHPIKRAAEGWAAPDALLG | |
| | QVKASLLPGGSEGGRRRRELDPMDVRGSIVYLEIDNRQCVQASSQCFQSA | |
| | TDVAAFLGALASLGSLNIPYKIEAVQSETVEPPPPAQLHFMYVAAAAFVL | |
| | LFFVGCGVLLSRSKKLEHMKLLSSIEQACDICRLKKLKCSKEKPKCAKCL | |
| | KNNWECRYSPKTKRSPLTRAHLTEVESRLERLEQLFLLIFPREDLDMILK | |
| | MDSLQDIKALLTGLFVQDNVNKDAVTDRLASVETDMPLTLRQHRISATS | |
| | SSEESSNKGQRQLTVSAAAGGSGGSGGSDALDDFDLDMLGSDALDDFDL | |
| | DMLGSDALDDFDLDMLGSDALDDFDLDMLGS | |
| 20 | MALPVTALLLPLALLLHAARPEQKLISEEDLDIQMTQTTSSLSASLGDRVT | pSTS020 |
| | ISCRASQDISKYLNWYQQKPDGTVKLLIYHTSRLHSGVPSRFSGSGSGTD | Human |
| | YSLTISNLEQEDIATYFCQQGNTLPYTFGGGTKLEITGGGGSGGGGSGGG | SynNotch1 |
| | GSEVKLQESGPGLVAPSQSLSVTCTVSGVSLPDYGVSWIRQPPRKGLEWL | with KCNE2 |
| | GVIWGSETTYYNSALKSRLTIIKDNSKSQVFLKMNSLQTDDTAIYYCAKH | STS |
| | YYYGGSYAMDYWGQGTSVTVSSILDYSFGGGAGRDIPPPLIEEACELPEC | |
| | QEDAGNKVCSLQCNNHACGWDGGDCSLNFNDPWKNCTQSLQCWKYFS | |
| | DGHCDSQCNSAGCLFDGFDCQRAEGQCNPLYDQYCKDHFSDGHCDQGC | |
| | NSAECEWDGLDCAEHVPERLAAGTLVVVVLMPPEQLRNSSFHFLRELSR | |
| | VLHTNVVFKRDAHGQQMIFPYYGREEELRKHPIKRAAEGWAAPDALLG | |
| | QVKASLLPGGSEGGRRRRELDPMDVRGSIVYLEIDNRQCVQASSQCFQSA | |
| | TDVAAFLGALASLGSLNIPYKIEAVQSETVEPPPPAQLHFMYVAAAAFVL | |
| | LFFVGCGVLLSKSKRREHMKLLSSIEQACDICRLKKLKCSKEKPKCAKCL | |
| | KNNWECRYSPKTKRSPLTRAHLTEVESRLERLEQLFLLIFPREDLDMILK | |
| | MDSLQDIKALLTGLFVQDNVNKDAVTDRLASVETDMPLTLRQHRISATS | |
| | SSEESSNKGQRQLTVSAAAGGSGGSGGSDALDDFDLDMLGSDALDDFDL | |
| | DMLGSDALDDFDLDMLGSDALDDFDLDMLGS | |
| 21 | MALPVTALLLPLALLLHAARPEQKLISEEDLDIQMTQTTSSLSASLGDRVT | pSTS021 |
| | ISCRASQDISKYLNWYQQKPDGTVKLLIYHTSRLHSGVPSRFSGSGSGTD | Human |
| | YSLTISNLEQEDIATYFCQQGNTLPYTFGGGTKLEITGGGGSGGGGSGGG | SynNotch1 |
| | GSEVKLQESGPGLVAPSQSLSVTCTVSGVSLPDYGVSWIRQPPRKGLEWL | with CHL1 |
| | GVIWGSETTYYNSALKSRLTIIKDNSKSQVFLKMNSLQTDDTAIYYCAKH | STS |
| | YYYGGSYAMDYWGQGTSVTVSSILDYSFGGGAGRDIPPPLIEEACELPEC | |
| | QEDAGNKVCSLQCNNHACGWDGGDCSLNFNDPWKNCTQSLQCWKYFS | |
| | DGHCDSQCNSAGCLFDGFDCQRAEGQCNPLYDQYCKDHFSDGHCDQGC | |
| | NSAECEWDGLDCAEHVPERLAAGTLVVVVLMPPEQLRNSSFHFLRELSR | |
| | VLHTNVVFKRDAHGQQMIFPYYGREEELRKHPIKRAAEGWAAPDALLG | |
| | QVKASLLPGGSEGGRRRRELDPMDVRGSIVYLEIDNRQCVQASSQCFQSA | |
| | TDVAAFLGALASLGSLNIPYKIEAVQSETVEPPPPAQLHFMYVAAAAFVL | |
| | LFFVGCGVLLSKRNRGGKMKLLSSIEQACDICRLKKLKCSKEKPKCAKCL | |
| | KNNWECRYSPKTKRSPLTRAHLTEVESRLERLEQLFLLIFPREDLDMILK | |
| | MDSLQDIKALLTGLFVQDNVNKDAVTDRLASVETDMPLTLRQHRISATS | |
| | SSEESSNKGQRQLTVSAAAGGSGGSGGSDALDDFDLDMLGSDALDDFDL | |
| | DMLGSDALDDFDLDMLGSDALDDFDLDMLGS | |
| 22 | MALPVTALLLPLALLLHAARPEQKLISEEDLDIQMTQTTSSLSASLGDRVT | pSTS022 |
| | ISCRASQDISKYLNWYQQKPDGTVKLLIYHTSRLHSGVPSRFSGSGSGTD | Human |
| | YSLTISNLEQEDIATYFCQQGNTLPYTFGGGTKLEITGGGGSGGGGSGGG | SynNotch1 |
| | GSEVKLQESGPGLVAPSQSLSVTCTVSGVSLPDYGVSWIRQPPRKGLEWL | with LRP1 |
| | GVIWGSETTYYNSALKSRLTIIKDNSKSQVFLKMNSLQTDDTAIYYCAKH | STS |
| | YYYGGSYAMDYWGQGTSVTVSSILDYSFGGGAGRDIPPPLIEEACELPEC | |
| | QEDAGNKVCSLQCNNHACGWDGGDCSLNFNDPWKNCTQSLQCWKYFS | |
| | DGHCDSQCNSAGCLFDGFDCQRAEGQCNPLYDQYCKDHFSDGHCDQGC | |
| | NSAECEWDGLDCAEHVPERLAAGTLVVVVLMPPEQLRNSSFHFLRELSR | |
| | VLHTNVVFKRDAHGQQMIFPYYGREEELRKHPIKRAAEGWAAPDALLG | |
| | QVKASLLPGGSEGGRRRRELDPMDVRGSIVYLEIDNRQCVQASSQCFQSA | |
| | TDVAAFLGALASLGSLNIPYKIEAVQSETVEPPPPAQLHFMYVAAAAFVL | |
| | LFFVGCGVLLSKRRMKLLSSIEQACDICRLKKLKCSKEKPKCAKCLKNN | |
| | WECRYSPKTKRSPLTRAHLTEVESRLERLEQLFLLIFPREDLDMILKMDSL | |
| | QDIKALLTGLFVQDNVNKDAVTDRLASVETDMPLTLRQHRISATSSSEES | |
| | SNKGQRQLTVSAAAGGSGGSGGSDALDDFDLDMLGSDALDDFDLDMLG | |
| | SDALDDFDLDMLGSDALDDFDLDMLGS | |
| 23 | MALPVTALLLPLALLLHAARPEQKLISEEDLDIQMTQTTSSLSASLGDRVT | pSTS023 |
| | ISCRASQDISKYLNWYQQKPDGTVKLLIYHTSRLHSGVPSRFSGSGSGTD | Human |
| | YSLTISNLEQEDIATYFCQQGNTLPYTFGGGTKLEITGGGGSGGGGSGGG | SynNotch1 |
| | GSEVKLQESGPGLVAPSQSLSVTCTVSGVSLPDYGVSWIRQPPRKGLEWL | with LRP2 |
| | GVIWGSETTYYNSALKSRLTIIKDNSKSQVFLKMNSLQTDDTAIYYCAKH | STS |
| | YYYGGSYAMDYWGQGTSVTVSSILDYSFGGGAGRDIPPPLIEEACELPEC | |
| | QEDAGNKVCSLQCNNHACGWDGGDCSLNFNDPWKNCTQSLQCWKYFS | |
| | DGHCDSQCNSAGCLFDGFDCQRAEGQCNPLYDQYCKDHFSDGHCDQGC | |
| | NSAECEWDGLDCAEHVPERLAAGTLVVVVLMPPEQLRNSSFHFLRELSR | |
| | VLHTNVVFKRDAHGQQMIFPYYGREEELRKHPIKRAAEGWAAPDALLG | |
| | QVKASLLPGGSEGGRRRRELDPMDVRGSIVYLEIDNRQCVQASSQCFQSA | |
| | TDVAAFLGALASLGSLNIPYKIEAVQSETVEPPPPAQLHFMYVAAAAFVL | |
| | LFFVGCGVLLSHYRRMKLLSSIEQACDICRLKKLKCSKEKPKCAKCLKNN | |
| | WECRYSPKTKRSPLTRAHLTEVESRLERLEQLFLLIFPREDLDMILKMDSL | |
| | QDIKALLTGLFVQDNVNKDAVTDRLASVETDMPLTLRQHRISATSSSEES | |
| | SNKGQRQLTVSAAAGGSGGSGGSDALDDFDLDMLGSDALDDFDLDMLG | |
| | SDALDDFDLDMLGSDALDDFDLDMLGS | |
| 24 | MALPVTALLLPLALLLHAARPEQKLISEEDLDIQMTQTTSSLSASLGDRVT | pSTS024 |
| | ISCRASQDISKYLNWYQQKPDGTVKLLIYHTSRLHSGVPSRFSGSGSGTD | Human |
| | YSLTISNLEQEDIATYFCQQGNTLPYTFGGGTKLEITGGGGSGGGGSGGG | SynNotch1 |
| | GSEVKLQESGPGLVAPSQSLSVTCTVSGVSLPDYGVSWIRQPPRKGLEWL | with PTPRF |
| | GVIWGSETTYYNSALKSRLTIIKDNSKSQVFLKMNSLQTDDTAIYYCAKH | STS |
| | YYYGGSYAMDYWGQGTSVTVSSILDYSFGGGAGRDIPPPLIEEACELPEC | |
| | QEDAGNKVCSLQCNNHACGWDGGDCSLNFNDPWKNCTQSLQCWKYFS | |
| | DGHCDSQCNSAGCLFDGFDCQRAEGQCNPLYDQYCKDHFSDGHCDQGC | |
| | NSAECEWDGLDCAEHVPERLAAGTLVVVVLMPPEQLRNSSFHFLRELSR | |
| | VLHTNVVFKRDAHGQQMIFPYYGREEELRKHPIKRAAEGWAAPDALLG | |
| | QVKASLLPGGSEGGRRRRELDPMDVRGSIVYLEIDNRQCVQASSQCFQSA | |
| | TDVAAFLGALASLGSLNIPYKIEAVQSETVEPPPPAQLHFMYVAAAAFVL | |
| | LFFVGCGVLLSKRKRTHMKLLSSIEQACDICRLKKLKCSKEKPKCAKCLK | |
| | NNWECRYSPKTKRSPLTRAHLTEVESRLERLEQLFLLIFPREDLDMILKM | |
| | DSLQDIKALLTGLFVQDNVNKDAVTDRLASVETDMPLTLRQHRISATSSS | |
| | EESSNKGQRQLTVSAAAGGSGGSGGSDALDDFDLDMLGSDALDDFDLD | |
| | MLGSDALDDFDLDMLGSDALDDFDLDMLGS | |
| 25 | MALPVTALLLPLALLLHAARPEQKLISEEDLDIQMTQTTSSLSASLGDRVT | pSTS025 |
| | ISCRASQDISKYLNWYQQKPDGTVKLLIYHTSRLHSGVPSRFSGSGSGTD | Human |
| | YSLTISNLEQEDIATYFCQQGNTLPYTFGGGTKLEITGGGGSGGGGSGGG | SynNotch1 |
| | GSEVKLQESGPGLVAPSQSLSVTCTVSGVSLPDYGVSWIRQPPRKGLEWL | with SCN1B |
| | GVIWGSETTYYNSALKSRLTIIKDNSKSQVFLKMNSLQTDDTAIYYCAKH | STS |
| | YYYGGSYAMDYWGQGTSVTVSSILDYSFGGGAGRDIPPPLIEEACELPEC | |
| | QEDAGNKVCSLQCNNHACGWDGGDCSLNFNDPWKNCTQSLQCWKYFS | |
| | DGHCDSQCNSAGCLFDGFDCQRAEGQCNPLYDQYCKDHFSDGHCDQGC | |
| | NSAECEWDGLDCAEHVPERLAAGTLVVVVLMPPEQLRNSSFHFLRELSR | |
| | VLHTNVVFKRDAHGQQMIFPYYGREEELRKHPIKRAAEGWAAPDALLG | |
| | QVKASLLPGGSEGGRRRRELDPMDVRGSIVYLEIDNRQCVQASSQCFQSA | |
| | TDVAAFLGALASLGSLNIPYKIEAVQSETVEPPPPAQLHFMYVAAAAFVL | |
| | LFFVGCGVLLSKKMKLLSSIEQACDICRLKKLKCSKEKPKCAKCLKNNW | |
| | ECRYSPKTKRSPLTRAHLTEVESRLERLEQLFLLIFPREDLDMILKMDSLQ | |
| | DIKALLTGLFVQDNVNKDAVTDRLASVETDMPLTLRQHRISATSSSEESS | |
| | NKGQRQLTVSAAAGGSGGSGGSDALDDFDLDMLGSDALDDFDLDMLGS | |
| | DALDDFDLDMLGSDALDDFDLDMLGS | |
| 26 | MALPVTALLLPLALLLHAARPEQKLISEEDLDIQMTQTTSSLSASLGDRVT | pSTS026 |
| | ISCRASQDISKYLNWYQQKPDGTVKLLIYHTSRLHSGVPSRFSGSGSGTD | Human |
| | YSLTISNLEQEDIATYFCQQGNTLPYTFGGGTKLEITGGGGSGGGGSGGG | SynNotch1 |
| | GSEVKLQESGPGLVAPSQSLSVTCTVSGVSLPDYGVSWIRQPPRKGLEWL | with SCN3B |
| | GVIWGSETTYYNSALKSRLTIIKDNSKSQVFLKMNSLQTDDTAIYYCAKH | STS |
| | YYYGGSYAMDYWGQGTSVTVSSILDYSFGGGAGRDIPPPLIEEACELPEC | |
| | QEDAGNKVCSLQCNNHACGWDGGDCSLNFNDPWKNCTQSLQCWKYFS | |
| | DGHCDSQCNSAGCLFDGFDCQRAEGQCNPLYDQYCKDHFSDGHCDQGC | |
| | NSAECEWDGLDCAEHVPERLAAGTLVVVVLMPPEQLRNSSFHFLRELSR | |
| | VLHTNVVFKRDAHGQQMIFPYYGREEELRKHPIKRAAEGWAAPDALLG | |
| | QVKASLLPGGSEGGRRRRELDPMDVRGSIVYLEIDNRQCVQASSQCFQSA | |
| | TDVAAFLGALASLGSLNIPYKIEAVQSETVEPPPPAQLHFMYVAAAAFVL | |
| | LFFVGCGVLLSRKVSKMKLLSSIEQACDICRLKKLKCSKEKPKCAKCLKN | |
| | NWECRYSPKTKRSPLTRAHLTEVESRLERLEQLFLLIFPREDLDMILKMDS | |
| | LQDIKALLTGLFVQDNVNKDAVTDRLASVETDMPLTLRQHRISATSSSEE | |
| | SSNKGQRQLTVSAAAGGSGGSGGSDALDDFDLDMLGSDALDDFDLDML | |
| | GSDALDDFDLDMLGSDALDDFDLDMLGS | |
| 27 | MALPVTALLLPLALLLHAARPEQKLISEEDLDIQMTQTTSSLSASLGDRVT | pSTS027 |
| | ISCRASQDISKYLNWYQQKPDGTVKLLIYHTSRLHSGVPSRFSGSGSGTD | Human |
| | YSLTISNLEQEDIATYFCQQGNTLPYTFGGGTKLEITGGGGSGGGGSGGG | SynNotch1 |
| | GSEVKLQESGPGLVAPSQSLSVTCTVSGVSLPDYGVSWIRQPPRKGLEWL | with NPR3 |
| | GVIWGSETTYYNSALKSRLTIIKDNSKSQVFLKMNSLQTDDTAIYYCAKH | STS |
| | YYYGGSYAMDYWGQGTSVTVSSILDYSFGGGAGRDIPPPLIEEACELPEC | |
| | QEDAGNKVCSLQCNNHACGWDGGDCSLNFNDPWKNCTQSLQCWKYFS | |
| | DGHCDSQCNSAGCLFDGFDCQRAEGQCNPLYDQYCKDHFSDGHCDQGC | |
| | NSAECEWDGLDCAEHVPERLAAGTLVVVVLMPPEQLRNSSFHFLRELSR | |
| | VLHTNVVFKRDAHGQQMIFPYYGREEELRKHPIKRAAEGWAAPDALLG | |
| | QVKASLLPGGSEGGRRRRELDPMDVRGSIVYLEIDNRQCVQASSQCFQSA | |
| | TDVAAFLGALASLGSLNIPYKIEAVQSETVEPPPPAQLHFMYVAAAAFVL | |
| | LFFVGCGVLLSRKKYRMKLLSSIEQACDICRLKKLKCSKEKPKCAKCLKN | |
| | NWECRYSPKTKRSPLTRAHLTEVESRLERLEQLFLLIFPREDLDMILKMDS | |
| | LQDIKALLTGLFVQDNVNKDAVTDRLASVETDMPLTLRQHRISATSSSEE | |
| | SSNKGQRQLTVSAAAGGSGGSGGSDALDDFDLDMLGSDALDDFDLDML | |
| | GSDALDDFDLDMLGSDALDDFDLDMLGS | |
| 28 | MALPVTALLLPLALLLHAARPEQKLISEEDLDIQMTQTTSSLSASLGDRVT | pSTS028 |
| | ISCRASQDISKYLNWYQQKPDGTVKLLIYHTSRLHSGVPSRFSGSGSGTD | Human |
| | YSLTISNLEQEDIATYFCQQGNTLPYTFGGGTKLEITGGGGSGGGGSGGG | SynNotch1 |
| | GSEVKLQESGPGLVAPSQSLSVTCTVSGVSLPDYGVSWIRQPPRKGLEWL | with NGFR |
| | GVIWGSETTYYNSALKSRLTIIKDNSKSQVFLKMNSLQTDDTAIYYCAKH | STS |
| | YYYGGSYAMDYWGQGTSVTVSSILDYSFGGGAGRDIPPPLIEEACELPEC | |
| | QEDAGNKVCSLQCNNHACGWDGGDCSLNFNDPWKNCTQSLQCWKYFS | |
| | DGHCDSQCNSAGCLFDGFDCQRAEGQCNPLYDQYCKDHFSDGHCDQGC | |
| | NSAECEWDGLDCAEHVPERLAAGTLVVVVLMPPEQLRNSSFHFLRELSR | |
| | VLHTNVVFKRDAHGQQMIFPYYGREEELRKHPIKRAAEGWAAPDALLG | |
| | QVKASLLPGGSEGGRRRRELDPMDVRGSIVYLEIDNRQCVQASSQCFQSA | |
| | TDVAAFLGALASLGSLNIPYKIEAVQSETVEPPPPAQLHFMYVAAAAFVL | |
| | LFFVGCGVLLSKRMKLLSSIEQACDICRLKKLKCSKEKPKCAKCLKNNW | |
| | ECRYSPKTKRSPLTRAHLTEVESRLERLEQLFLLIFPREDLDMILKMDSLQ | |
| | DIKALLTGLFVQDNVNKDAVTDRLASVETDMPLTLRQHRISATSSSEESS | |
| | NKGQRQLTVSAAAGGSGGSGGSDALDDFDLDMLGSDALDDFDLDMLGS | |
| | DALDDFDLDMLGSDALDDFDLDMLGS | |
| 29 | MALPVTALLLPLALLLHAARPEQKLISEEDLDIQMTQTTSSLSASLGDRVT | pSTS029 |
| | ISCRASQDISKYLNWYQQKPDGTVKLLIYHTSRLHSGVPSRFSGSGSGTD | Human |
| | YSLTISNLEQEDIATYFCQQGNTLPYTFGGGTKLEITGGGGSGGGGSGGG | SynNotch1 |
| | GSEVKLQESGPGLVAPSQSLSVTCTVSGVSLPDYGVSWIRQPPRKGLEWL | with PLXDC2 |
| | GVIWGSETTYYNSALKSRLTIIKDNSKSQVFLKMNSLQTDDTAIYYCAKH | STS |
| | YYYGGSYAMDYWGQGTSVTVSSILDYSFGGGAGRDIPPPLIEEACELPEC | |
| | QEDAGNKVCSLQCNNHACGWDGGDCSLNFNDPWKNCTQSLQCWKYFS | |
| | DGHCDSQCNSAGCLFDGFDCQRAEGQCNPLYDQYCKDHFSDGHCDQGC | |
| | NSAECEWDGLDCAEHVPERLAAGTLVVVVLMPPEQLRNSSFHFLRELSR | |
| | VLHTNVVFKRDAHGQQMIFPYYGREEELRKHPIKRAAEGWAAPDALLG | |
| | QVKASLLPGGSEGGRRRRELDPMDVRGSIVYLEIDNRQCVQASSQCFQSA | |
| | TDVAAFLGALASLGSLNIPYKIEAVQSETVEPPPPAQLHFMYVAAAAFVL | |
| | LFFVGCGVLLSHHMKLLSSIEQACDICRLKKLKCSKEKPKCAKCLKNNW | |
| | ECRYSPKTKRSPLTRAHLTEVESRLERLEQLFLLIFPREDLDMILKMDSLQ | |
| | DIKALLTGLFVQDNVNKDAVTDRLASVETDMPLTLRQHRISATSSSEESS | |
| | NKGQRQLTVSAAAGGSGGSGGSDALDDFDLDMLGSDALDDFDLDMLGS | |
| | DALDDFDLDMLGSDALDDFDLDMLGS | |
| 30 | MALPVTALLLPLALLLHAARPEQKLISEEDLDIQMTQTTSSLSASLGDRVT | pSTS030 |
| | ISCRASQDISKYLNWYQQKPDGTVKLLIYHTSRLHSGVPSRFSGSGSGTD | Human |
| | YSLTISNLEQEDIATYFCQQGNTLPYTFGGGTKLEITGGGGSGGGGSGGG | SynNotch1 |
| | GSEVKLQESGPGLVAPSQSLSVTCTVSGVSLPDYGVSWIRQPPRKGLEWL | with PAM STS |
| | GVIWGSETTYYNSALKSRLTIIKDNSKSQVFLKMNSLQTDDTAIYYCAKH | |
| | YYYGGSYAMDYWGQGTSVTVSSILDYSFGGGAGRDIPPPLIEEACELPEC | |
| | QEDAGNKVCSLQCNNHACGWDGGDCSLNFNDPWKNCTQSLQCWKYFS | |
| | DGHCDSQCNSAGCLFDGFDCQRAEGQCNPLYDQYCKDHFSDGHCDQGC | |
| | NSAECEWDGLDCAEHVPERLAAGTLVVVVLMPPEQLRNSSFHFLRELSR | |
| | VLHTNVVFKRDAHGQQMIFPYYGREEELRKHPIKRAAEGWAAPDALLG | |
| | QVKASLLPGGSEGGRRRRELDPMDVRGSIVYLEIDNRQCVQASSQCFQSA | |
| | TDVAAFLGALASLGSLNIPYKIEAVQSETVEPPPPAQLHFMYVAAAAFVL | |
| | LFFVGCGVLLSRWKKSRMKLLSSIEQACDICRLKKLKCSKEKPKCAKCLK | |
| | NNWECRYSPKTKRSPLTRAHLTEVESRLERLEQLFLLIFPREDLDMILKM | |
| | DSLQDIKALLTGLFVQDNVNKDAVTDRLASVETDMPLTLRQHRISATSSS | |
| | EESSNKGQRQLTVSAAAGGSGGSGGSDALDDFDLDMLGSDALDDFDLD | |
| | MLGSDALDDFDLDMLGSDALDDFDLDMLGS | |
| 31 | MALPVTALLLPLALLLHAARPEQKLISEEDLDIQMTQTTSSLSASLGDRVT | pSTS031 |
| | ISCRASQDISKYLNWYQQKPDGTVKLLIYHTSRLHSGVPSRFSGSGSGTD | Human |
| | YSLTISNLEQEDIATYFCQQGNTLPYTFGGGTKLEITGGGGSGGGGSGGG | SynNotch1 |
| | GSEVKLQESGPGLVAPSQSLSVTCTVSGVSLPDYGVSWIRQPPRKGLEWL | with AGER |
| | GVIWGSETTYYNSALKSRLTIIKDNSKSQVFLKMNSLQTDDTAIYYCAKH | STS |
| | YYYGGSYAMDYWGQGTSVTVSSILDYSFGGGAGRDIPPPLIEEACELPEC | |
| | QEDAGNKVCSLQCNNHACGWDGGDCSLNFNDPWKNCTQSLQCWKYFS | |
| | DGHCDSQCNSAGCLFDGFDCQRAEGQCNPLYDQYCKDHFSDGHCDQGC | |
| | NSAECEWDGLDCAEHVPERLAAGTLVVVVLMPPEQLRNSSFHFLRELSR | |
| | VLHTNVVFKRDAHGQQMIFPYYGREEELRKHPIKRAAEGWAAPDALLG | |
| | QVKASLLPGGSEGGRRRRELDPMDVRGSIVYLEIDNRQCVQASSQCFQSA | |
| | TDVAAFLGALASLGSLNIPYKIEAVQSETVEPPPPAQLHFMYVAAAAFVL | |
| | LFFVGCGVLLSRRQRRMKLLSSIEQACDICRLKKLKCSKEKPKCAKCLKN | |
| | NWECRYSPKTKRSPLTRAHLTEVESRLERLEQLFLLIFPREDLDMILKMDS | |
| | LQDIKALLTGLFVQDNVNKDAVTDRLASVETDMPLTLRQHRISATSSSEE | |
| | SSNKGQRQLTVSAAAGGSGGSGGSDALDDFDLDMLGSDALDDFDLDML | |
| | GSDALDDFDLDMLGSDALDDFDLDMLGS | |
| 32 | MALPVTALLLPLALLLHAARPEQKLISEEDLDIQMTQTTSSLSASLGDRVT | pSTS032 |
| | ISCRASQDISKYLNWYQQKPDGTVKLLIYHTSRLHSGVPSRFSGSGSGTD | Human |
| | YSLTISNLEQEDIATYFCQQGNTLPYTFGGGTKLEITGGGGSGGGGSGGG | SynNotch1 |
| | GSEVKLQESGPGLVAPSQSLSVTCTVSGVSLPDYGVSWIRQPPRKGLEWL | with ROBO1 |
| | GVIWGSETTYYNSALKSRLTIIKDNSKSQVFLKMNSLQTDDTAIYYCAKH | STS |
| | YYYGGSYAMDYWGQGTSVTVSSILDYSFGGGAGRDIPPPLIEEACELPEC | |
| | QEDAGNKVCSLQCNNHACGWDGGDCSLNFNDPWKNCTQSLQCWKYFS | |
| | DGHCDSQCNSAGCLFDGFDCQRAEGQCNPLYDQYCKDHFSDGHCDQGC | |
| | NSAECEWDGLDCAEHVPERLAAGTLVVVVLMPPEQLRNSSFHFLRELSR | |
| | VLHTNVVFKRDAHGQQMIFPYYGREEELRKHPIKRAAEGWAAPDALLG | |
| | QVKASLLPGGSEGGRRRRELDPMDVRGSIVYLEIDNRQCVQASSQCFQSA | |
| | TDVAAFLGALASLGSLNIPYKIEAVQSETVEPPPPAQLHFMYVAAAAFVL | |
| | LFFVGCGVLLSRHRKKRMKLLSSIEQACDICRLKKLKCSKEKPKCAKCLK | |
| | NNWECRYSPKTKRSPLTRAHLTEVESRLERLEQLFLLIFPREDLDMILKM | |
| | DSLQDIKALLTGLFVQDNVNKDAVTDRLASVETDMPLTLRQHRISATSSS | |
| | EESSNKGQRQLTVSAAAGGSGGSGGSDALDDFDLDMLGSDALDDFDLD | |
| | MLGSDALDDFDLDMLGSDALDDFDLDMLGS | |
| 33 | MALPVTALLLPLALLLHAARPEQKLISEEDLDIQMTQTTSSLSASLGDRVT | pSTS033 |
| | ISCRASQDISKYLNWYQQKPDGTVKLLIYHTSRLHSGVPSRFSGSGSGTD | Human |
| | YSLTISNLEQEDIATYFCQQGNTLPYTFGGGTKLEITGGGGSGGGGSGGG | SynNotch1 |
| | GSEVKLQESGPGLVAPSQSLSVTCTVSGVSLPDYGVSWIRQPPRKGLEWL | with SORCS3 |
| | GVIWGSETTYYNSALKSRLTIIKDNSKSQVFLKMNSLQTDDTAIYYCAKH | STS |
| | YYYGGSYAMDYWGQGTSVTVSSILDYSFGGGAGRDIPPPLIEEACELPEC | |
| | QEDAGNKVCSLQCNNHACGWDGGDCSLNFNDPWKNCTQSLQCWKYFS | |
| | DGHCDSQCNSAGCLFDGFDCQRAEGQCNPLYDQYCKDHFSDGHCDQGC | |
| | NSAECEWDGLDCAEHVPERLAAGTLVVVVLMPPEQLRNSSFHFLRELSR | |
| | VLHTNVVFKRDAHGQQMIFPYYGREEELRKHPIKRAAEGWAAPDALLG | |
| | QVKASLLPGGSEGGRRRRELDPMDVRGSIVYLEIDNRQCVQASSQCFQSA | |
| | TDVAAFLGALASLGSLNIPYKIEAVQSETVEPPPPAQLHFMYVAAAAFVL | |
| | LFFVGCGVLLSKRKMKLLSSIEQACDICRLKKLKCSKEKPKCAKCLKNN | |
| | WECRYSPKTKRSPLTRAHLTEVESRLERLEQLFLLIFPREDLDMILKMDSL | |
| | QDIKALLTGLFVQDNVNKDAVTDRLASVETDMPLTLRQHRISATSSSEES | |
| | SNKGQRQLTVSAAAGGSGGSGGSDALDDFDLDMLGSDALDDFDLDMLG | |
| | SDALDDFDLDMLGSDALDDFDLDMLGS | |
| 34 | MALPVTALLLPLALLLHAARPEQKLISEEDLDIQMTQTTSSLSASLGDRVT | pSTS034 |
| | ISCRASQDISKYLNWYQQKPDGTVKLLIYHTSRLHSGVPSRFSGSGSGTD | Human |
| | YSLTISNLEQEDIATYFCQQGNTLPYTFGGGTKLEITGGGGSGGGGSGGG | SynNotch1 |
| | GSEVKLQESGPGLVAPSQSLSVTCTVSGVSLPDYGVSWIRQPPRKGLEWL | with SORCS1 |
| | GVIWGSETTYYNSALKSRLTIIKDNSKSQVFLKMNSLQTDDTAIYYCAKH | STS |
| | YYYGGSYAMDYWGQGTSVTVSSILDYSFGGGAGRDIPPPLIEEACELPEC | |
| | QEDAGNKVCSLQCNNHACGWDGGDCSLNFNDPWKNCTQSLQCWKYFS | |
| | DGHCDSQCNSAGCLFDGFDCQRAEGQCNPLYDQYCKDHFSDGHCDQGC | |
| | NSAECEWDGLDCAEHVPERLAAGTLVVVVLMPPEQLRNSSFHFLRELSR | |
| | VLHTNVVFKRDAHGQQMIFPYYGREEELRKHPIKRAAEGWAAPDALLG | |
| | QVKASLLPGGSEGGRRRRELDPMDVRGSIVYLEIDNRQCVQASSQCFQSA | |
| | TDVAAFLGALASLGSLNIPYKIEAVQSETVEPPPPAQLHFMYVAAAAFVL | |
| | LFFVGCGVLLSKFKRRMKLLSSIEQACDICRLKKLKCSKEKPKCAKCLKN | |
| | NWECRYSPKTKRSPLTRAHLTEVESRLERLEQLFLLIFPREDLDMILKMDS | |
| | LQDIKALLTGLFVQDNVNKDAVTDRLASVETDMPLTLRQHRISATSSSEE | |
| | SSNKGQRQLTVSAAAGGSGGSGGSDALDDFDLDMLGSDALDDFDLDML | |
| | GSDALDDFDLDMLGSDALDDFDLDMLGS | |
| 35 | MALPVTALLLPLALLLHAARPEQKLISEEDLDIQMTQTTSSLSASLGDRVT | pSTS035 |
| | ISCRASQDISKYLNWYQQKPDGTVKLLIYHTSRLHSGVPSRFSGSGSGTD | Human |
| | YSLTISNLEQEDIATYFCQQGNTLPYTFGGGTKLEITGGGGSGGGGSGGG | SynNotch1 |
| | GSEVKLQESGPGLVAPSQSLSVTCTVSGVSLPDYGVSWIRQPPRKGLEWL | with SORL1 |
| | GVIWGSETTYYNSALKSRLTIIKDNSKSQVFLKMNSLQTDDTAIYYCAKH | STS |
| | YYYGGSYAMDYWGQGTSVTVSSILDYSFGGGAGRDIPPPLIEEACELPEC | |
| | QEDAGNKVCSLQCNNHACGWDGGDCSLNFNDPWKNCTQSLQCWKYFS | |
| | DGHCDSQCNSAGCLFDGFDCQRAEGQCNPLYDQYCKDHFSDGHCDQGC | |
| | NSAECEWDGLDCAEHVPERLAAGTLVVVVLMPPEQLRNSSFHFLRELSR | |
| | VLHTNVVFKRDAHGQQMIFPYYGREEELRKHPIKRAAEGWAAPDALLG | |
| | QVKASLLPGGSEGGRRRRELDPMDVRGSIVYLEIDNRQCVQASSQCFQSA | |
| | TDVAAFLGALASLGSLNIPYKIEAVQSETVEPPPPAQLHFMYVAAAAFVL | |
| | LFFVGCGVLLSKHRRMKLLSSIEQACDICRLKKLKCSKEKPKCAKCLKNN | |
| | WECRYSPKTKRSPLTRAHLTEVESRLERLEQLFLLIFPREDLDMILKMDSL | |
| | QDIKALLTGLFVQDNVNKDAVTDRLASVETDMPLTLRQHRISATSSSEES | |
| | SNKGQRQLTVSAAAGGSGGSGGSDALDDFDLDMLGSDALDDFDLDMLG | |
| | SDALDDFDLDMLGSDALDDFDLDMLGS | |
| 36 | MALPVTALLLPLALLLHAARPEQKLISEEDLDIQMTQTTSSLSASLGDRVT | pSTS036 |
| | ISCRASQDISKYLNWYQQKPDGTVKLLIYHTSRLHSGVPSRFSGSGSGTD | Human |
| | YSLTISNLEQEDIATYFCQQGNTLPYTFGGGTKLEITGGGGSGGGGSGGG | SynNotch1 |
| | GSEVKLQESGPGLVAPSQSLSVTCTVSGVSLPDYGVSWIRQPPRKGLEWL | with SDC1 |
| | GVIWGSETTYYNSALKSRLTIIKDNSKSQVFLKMNSLQTDDTAIYYCAKH | STS |
| | YYYGGSYAMDYWGQGTSVTVSSILDYSFGGGAGRDIPPPLIEEACELPEC | |
| | QEDAGNKVCSLQCNNHACGWDGGDCSLNFNDPWKNCTQSLQCWKYFS | |
| | DGHCDSQCNSAGCLFDGFDCQRAEGQCNPLYDQYCKDHFSDGHCDQGC | |
| | NSAECEWDGLDCAEHVPERLAAGTLVVVVLMPPEQLRNSSFHFLRELSR | |
| | VLHTNVVFKRDAHGQQMIFPYYGREEELRKHPIKRAAEGWAAPDALLG | |
| | QVKASLLPGGSEGGRRRRELDPMDVRGSIVYLEIDNRQCVQASSQCFQSA | |
| | TDVAAFLGALASLGSLNIPYKIEAVQSETVEPPPPAQLHFMYVAAAAFVL | |
| | LFFVGCGVLLSRMKKKMKLLSSIEQACDICRLKKLKCSKEKPKCAKCLK | |
| | NNWECRYSPKTKRSPLTRAHLTEVESRLERLEQLFLLIFPREDLDMILKM | |
| | DSLQDIKALLTGLFVQDNVNKDAVTDRLASVETDMPLTLRQHRISATSSS | |
| | EESSNKGQRQLTVSAAAGGSGGSGGSDALDDFDLDMLGSDALDDFDLD | |
| | MLGSDALDDFDLDMLGSDALDDFDLDMLGS | |
| 37 | MALPVTALLLPLALLLHAARPEQKLISEEDLDIQMTQTTSSLSASLGDRVT | pSTS037 |
| | ISCRASQDISKYLNWYQQKPDGTVKLLIYHTSRLHSGVPSRFSGSGSGTD | Human |
| | YSLTISNLEQEDIATYFCQQGNTLPYTFGGGTKLEITGGGGSGGGGSGGG | SynNotch1 |
| | GSEVKLQESGPGLVAPSQSLSVTCTVSGVSLPDYGVSWIRQPPRKGLEWL | with SDC2 |
| | GVIWGSETTYYNSALKSRLTIIKDNSKSQVFLKMNSLQTDDTAIYYCAKH | STS |
| | YYYGGSYAMDYWGQGTSVTVSSILDYSFGGGAGRDIPPPLIEEACELPEC | |
| | QEDAGNKVCSLQCNNHACGWDGGDCSLNFNDPWKNCTQSLQCWKYFS | |
| | DGHCDSQCNSAGCLFDGFDCQRAEGQCNPLYDQYCKDHFSDGHCDQGC | |
| | NSAECEWDGLDCAEHVPERLAAGTLVVVVLMPPEQLRNSSFHFLRELSR | |
| | VLHTNVVFKRDAHGQQMIFPYYGREEELRKHPIKRAAEGWAAPDALLG | |
| | QVKASLLPGGSEGGRRRRELDPMDVRGSIVYLEIDNRQCVQASSQCFQSA | |
| | TDVAAFLGALASLGSLNIPYKIEAVQSETVEPPPPAQLHFMYVAAAAFVL | |
| | LFFVGCGVLLSRMRKKMKLLSSIEQACDICRLKKLKCSKEKPKCAKCLK | |
| | NNWECRYSPKTKRSPLTRAHLTEVESRLERLEQLFLLIFPREDLDMILKM | |
| | DSLQDIKALLTGLFVQDNVNKDAVTDRLASVETDMPLTLRQHRISATSSS | |
| | EESSNKGQRQLTVSAAAGGSGGSGGSDALDDFDLDMLGSDALDDFDLD | |
| | MLGSDALDDFDLDMLGSDALDDFDLDMLGS | |
| 38 | MALPVTALLLPLALLLHAARPEQKLISEEDLDIQMTQTTSSLSASLGDRVT | pSTS038 |
| | ISCRASQDISKYLNWYQQKPDGTVKLLIYHTSRLHSGVPSRFSGSGSGTD | Human |
| | YSLTISNLEQEDIATYFCQQGNTLPYTFGGGTKLEITGGGGSGGGGSGGG | SynNotch1 |
| | GSEVKLQESGPGLVAPSQSLSVTCTVSGVSLPDYGVSWIRQPPRKGLEWL | with SPN STS |
| | GVIWGSETTYYNSALKSRLTIIKDNSKSQVFLKMNSLQTDDTAIYYCAKH | |
| | YYYGGSYAMDYWGQGTSVTVSSILDYSFGGGAGRDIPPPLIEEACELPEC | |
| | QEDAGNKVCSLQCNNHACGWDGGDCSLNFNDPWKNCTQSLQCWKYFS | |
| | DGHCDSQCNSAGCLFDGFDCQRAEGQCNPLYDQYCKDHFSDGHCDQGC | |
| | NSAECEWDGLDCAEHVPERLAAGTLVVVVLMPPEQLRNSSFHFLRELSR | |
| | VLHTNVVFKRDAHGQQMIFPYYGREEELRKHPIKRAAEGWAAPDALLG | |
| | QVKASLLPGGSEGGRRRRELDPMDVRGSIVYLEIDNRQCVQASSQCFQSA | |
| | TDVAAFLGALASLGSLNIPYKIEAVQSETVEPPPPAQLHFMYVAAAAFVL | |
| | LFFVGCGVLLSRRRQKRRMKLLSSIEQACDICRLKKLKCSKEKPKCAKCL | |
| | KNNWECRYSPKTKRSPLTRAHLTEVESRLERLEQLFLLIFPREDLDMILK | |
| | MDSLQDIKALLTGLFVQDNVNKDAVTDRLASVETDMPLTLRQHRISATS | |
| | SSEESSNKGQRQLTVSAAAGGSGGSGGSDALDDFDLDMLGSDALDDFDL | |
| | DMLGSDALDDFDLDMLGSDALDDFDLDMLGS | |
| 39 | MALPVTALLLPLALLLHAARPEQKLISEEDLDIQMTQTTSSLSASLGDRVT | pSTS039 |
| | ISCRASQDISKYLNWYQQKPDGTVKLLIYHTSRLHSGVPSRFSGSGSGTD | Human |
| | YSLTISNLEQEDIATYFCQQGNTLPYTFGGGTKLEITGGGGSGGGGSGGG | SynNotch1 |
| | GSEVKLQESGPGLVAPSQSLSVTCTVSGVSLPDYGVSWIRQPPRKGLEWL | with TYR STS |
| | GVIWGSETTYYNSALKSRLTIIKDNSKSQVFLKMNSLQTDDTAIYYCAKH | |
| | YYYGGSYAMDYWGQGTSVTVSSILDYSFGGGAGRDIPPPLIEEACELPEC | |
| | QEDAGNKVCSLQCNNHACGWDGGDCSLNFNDPWKNCTQSLQCWKYFS | |
| | DGHCDSQCNSAGCLFDGFDCQRAEGQCNPLYDQYCKDHFSDGHCDQGC | |
| | NSAECEWDGLDCAEHVPERLAAGTLVVVVLMPPEQLRNSSFHFLRELSR | |
| | VLHTNVVFKRDAHGQQMIFPYYGREEELRKHPIKRAAEGWAAPDALLG | |
| | QVKASLLPGGSEGGRRRRELDPMDVRGSIVYLEIDNRQCVQASSQCFQSA | |
| | TDVAAFLGALASLGSLNIPYKIEAVQSETVEPPPPAQLHFMYVAAAAFVL | |
| | LFFVGCGVLLSRHKRKMKLLSSIEQACDICRLKKLKCSKEKPKCAKCLKN | |
| | NWECRYSPKTKRSPLTRAHLTEVESRLERLEQLFLLIFPREDLDMILKMDS | |
| | LQDIKALLTGLFVQDNVNKDAVTDRLASVETDMPLTLRQHRISATSSSEE | |
| | SSNKGQRQLTVSAAAGGSGGSGGSDALDDFDLDMLGSDALDDFDLDML | |
| | GSDALDDFDLDMLGSDALDDFDLDMLGS | |
| 40 | MALPVTALLLPLALLLHAARPEQKLISEEDLDIQMTQTTSSLSASLGDRVT | pSTS040 |
| | ISCRASQDISKYLNWYQQKPDGTVKLLIYHTSRLHSGVPSRFSGSGSGTD | Human |
| | YSLTISNLEQEDIATYFCQQGNTLPYTFGGGTKLEITGGGGSGGGGSGGG | SynNotch1 |
| | GSEVKLQESGPGLVAPSQSLSVTCTVSGVSLPDYGVSWIRQPPRKGLEWL | with TYRP1 |
| | GVIWGSETTYYNSALKSRLTIIKDNSKSQVFLKMNSLQTDDTAIYYCAKH | STS |
| | YYYGGSYAMDYWGQGTSVTVSSILDYSFGGGAGRDIPPPLIEEACELPEC | |
| | QEDAGNKVCSLQCNNHACGWDGGDCSLNFNDPWKNCTQSLQCWKYFS | |
| | DGHCDSQCNSAGCLFDGFDCQRAEGQCNPLYDQYCKDHFSDGHCDQGC | |
| | NSAECEWDGLDCAEHVPERLAAGTLVVVVLMPPEQLRNSSFHFLRELSR | |
| | VLHTNVVFKRDAHGQQMIFPYYGREEELRKHPIKRAAEGWAAPDALLG | |
| | QVKASLLPGGSEGGRRRRELDPMDVRGSIVYLEIDNRQCVQASSQCFQSA | |
| | TDVAAFLGALASLGSLNIPYKIEAVQSETVEPPPPAQLHFMYVAAAAFVL | |
| | LFFVGCGVLLSRARRMKLLSSIEQACDICRLKKLKCSKEKPKCAKCLKNN | |
| | WECRYSPKTKRSPLTRAHLTEVESRLERLEQLFLLIFPREDLDMILKMDSL | |
| | QDIKALLTGLFVQDNVNKDAVTDRLASVETDMPLTLRQHRISATSSSEES | |
| | SNKGQRQLTVSAAAGGSGGSGGSDALDDFDLDMLGSDALDDFDLDMLG | |
| | SDALDDFDLDMLGSDALDDFDLDMLGS | |
| 41 | MALPVTALLLPLALLLHAARPEQKLISEEDLDIQMTQTTSSLSASLGDRVT | pSTS041 |
| | ISCRASQDISKYLNWYQQKPDGTVKLLIYHTSRLHSGVPSRFSGSGSGTD | Human |
| | YSLTISNLEQEDIATYFCQQGNTLPYTFGGGTKLEITGGGGSGGGGSGGG | SynNotch1 |
| | GSEVKLQESGPGLVAPSQSLSVTCTVSGVSLPDYGVSWIRQPPRKGLEWL | with DCT STS |
| | GVIWGSETTYYNSALKSRLTIIKDNSKSQVFLKMNSLQTDDTAIYYCAKH | |
| | YYYGGSYAMDYWGQGTSVTVSSILDYSFGGGAGRDIPPPLIEEACELPEC | |
| | QEDAGNKVCSLQCNNHACGWDGGDCSLNFNDPWKNCTQSLQCWKYFS | |
| | DGHCDSQCNSAGCLFDGFDCQRAEGQCNPLYDQYCKDHFSDGHCDQGC | |
| | NSAECEWDGLDCAEHVPERLAAGTLVVVVLMPPEQLRNSSFHFLRELSR | |
| | VLHTNVVFKRDAHGQQMIFPYYGREEELRKHPIKRAAEGWAAPDALLG | |
| | QVKASLLPGGSEGGRRRRELDPMDVRGSIVYLEIDNRQCVQASSQCFQSA | |
| | TDVAAFLGALASLGSLNIPYKIEAVQSETVEPPPPAQLHFMYVAAAAFVL | |
| | LFFVGCGVLLSRRLRKMKLLSSIEQACDICRLKKLKCSKEKPKCAKCLKN | |
| | NWECRYSPKTKRSPLTRAHLTEVESRLERLEQLFLLIFPREDLDMILKMDS | |
| | LQDIKALLTGLFVQDNVNKDAVTDRLASVETDMPLTLRQHRISATSSSEE | |
| | SSNKGQRQLTVSAAAGGSGGSGGSDALDDFDLDMLGSDALDDFDLDML | |
| | GSDALDDFDLDMLGSDALDDFDLDMLGS | |
| 42 | MALPVTALLLPLALLLHAARPEQKLISEEDLDIQMTQTTSSLSASLGDRVT | pSTS042 |
| | ISCRASQDISKYLNWYQQKPDGTVKLLIYHTSRLHSGVPSRFSGSGSGTD | Human |
| | YSLTISNLEQEDIATYFCQQGNTLPYTFGGGTKLEITGGGGSGGGGSGGG | SynNotch1 |
| | GSEVKLQESGPGLVAPSQSLSVTCTVSGVSLPDYGVSWIRQPPRKGLEWL | with VASN |
| | GVIWGSETTYYNSALKSRLTIIKDNSKSQVFLKMNSLQTDDTAIYYCAKH | STS |
| | YYYGGSYAMDYWGQGTSVTVSSILDYSFGGGAGRDIPPPLIEEACELPEC | |
| | QEDAGNKVCSLQCNNHACGWDGGDCSLNFNDPWKNCTQSLQCWKYFS | |
| | DGHCDSQCNSAGCLFDGFDCQRAEGQCNPLYDQYCKDHFSDGHCDQGC | |
| | NSAECEWDGLDCAEHVPERLAAGTLVVVVLMPPEQLRNSSFHFLRELSR | |
| | VLHTNVVFKRDAHGQQMIFPYYGREEELRKHPIKRAAEGWAAPDALLG | |
| | QVKASLLPGGSEGGRRRRELDPMDVRGSIVYLEIDNRQCVQASSQCFQSA | |
| | TDVAAFLGALASLGSLNIPYKIEAVQSETVEPPPPAQLHFMYVAAAAFVL | |
| | LFFVGCGVLLSRRGRMKLLSSIEQACDICRLKKLKCSKEKPKCAKCLKNN | |
| | WECRYSPKTKRSPLTRAHLTEVESRLERLEQLFLLIFPREDLDMILKMDSL | |
| | QDIKALLTGLFVQDNVNKDAVTDRLASVETDMPLTLRQHRISATSSSEES | |
| | SNKGQRQLTVSAAAGGSGGSGGSDALDDFDLDMLGSDALDDFDLDMLG | |
| | SDALDDFDLDMLGSDALDDFDLDMLGS | |
| 43 | MALPVTALLLPLALLLHAARPEQKLISEEDLDIQMTQTTSSLSASLGDRVT | pSTS043 |
| | ISCRASQDISKYLNWYQQKPDGTVKLLIYHTSRLHSGVPSRFSGSGSGTD | Human |
| | YSLTISNLEQEDIATYFCQQGNTLPYTFGGGTKLEITGGGGSGGGGSGGG | SynNotch1 |
| | GSEVKLQESGPGLVAPSQSLSVTCTVSGVSLPDYGVSWIRQPPRKGLEWL | with FLT1 |
| | GVIWGSETTYYNSALKSRLTIIKDNSKSQVFLKMNSLQTDDTAIYYCAKH | STS |
| | YYYGGSYAMDYWGQGTSVTVSSILDYSFGGGAGRDIPPPLIEEACELPEC | |
| | QEDAGNKVCSLQCNNHACGWDGGDCSLNFNDPWKNCTQSLQCWKYFS | |
| | DGHCDSQCNSAGCLFDGFDCQRAEGQCNPLYDQYCKDHFSDGHCDQGC | |
| | NSAECEWDGLDCAEHVPERLAAGTLVVVVLMPPEQLRNSSFHFLRELSR | |
| | VLHTNVVFKRDAHGQQMIFPYYGREEELRKHPIKRAAEGWAAPDALLG | |
| | QVKASLLPGGSEGGRRRRELDPMDVRGSIVYLEIDNRQCVQASSQCFQSA | |
| | TDVAAFLGALASLGSLNIPYKIEAVQSETVEPPPPAQLHFMYVAAAAFVL | |
| | LFFVGCGVLLSRKMKRMKLLSSIEQACDICRLKKLKCSKEKPKCAKCLK | |
| | NNWECRYSPKTKRSPLTRAHLTEVESRLERLEQLFLLIFPREDLDMILKM | |
| | DSLQDIKALLTGLFVQDNVNKDAVTDRLASVETDMPLTLRQHRISATSSS | |
| | EESSNKGQRQLTVSAAAGGSGGSGGSDALDDFDLDMLGSDALDDFDLD | |
| | MLGSDALDDFDLDMLGSDALDDFDLDMLGS | |
| 44 | MALPVTALLLPLALLLHAARPEQKLISEEDLDIQMTQTTSSLSASLGDRVT | pSTS044 |
| | ISCRASQDISKYLNWYQQKPDGTVKLLIYHTSRLHSGVPSRFSGSGSGTD | Human |
| | YSLTISNLEQEDIATYFCQQGNTLPYTFGGGTKLEITGGGGSGGGGSGGG | SynNotch1 |
| | GSEVKLQESGPGLVAPSQSLSVTCTVSGVSLPDYGVSWIRQPPRKGLEWL | with CDH5 |
| | GVIWGSETTYYNSALKSRLTIIKDNSKSQVFLKMNSLQTDDTAIYYCAKH | STS |
| | YYYGGSYAMDYWGQGTSVTVSSILDYSFGGGAGRDIPPPLIEEACELPEC | |
| | QEDAGNKVCSLQCNNHACGWDGGDCSLNFNDPWKNCTQSLQCWKYFS | |
| | DGHCDSQCNSAGCLFDGFDCQRAEGQCNPLYDQYCKDHFSDGHCDQGC | |
| | NSAECEWDGLDCAEHVPERLAAGTLVVVVLMPPEQLRNSSFHFLRELSR | |
| | VLHTNVVFKRDAHGQQMIFPYYGREEELRKHPIKRAAEGWAAPDALLG | |
| | QVKASLLPGGSEGGRRRRELDPMDVRGSIVYLEIDNRQCVQASSQCFQSA | |
| | TDVAAFLGALASLGSLNIPYKIEAVQSETVEPPPPAQLHFMYVAAAAFVL | |
| | LFFVGCGVLLSRRRLRKQARAHGKMKLLSSIEQACDICRLKKLKCSKEKP | |
| | KCAKCLKNNWECRYSPKTKRSPLTRAHLTEVESRLERLEQLFLLIFPRED | |
| | LDMILKMDSLQDIKALLTGLFVQDNVNKDAVTDRLASVETDMPLTLRQH | |
| | RISATSSSEESSNKGQRQLTVSAAAGGSGGSGGSDALDDFDLDMLGSDAL | |
| | DDFDLDMLGSDALDDFDLDMLGSDALDDFDLDMLGS | |
| 45 | MALPVTALLLPLALLLHAARPEQKLISEEDLDIQMTQTTSSLSASLGDRVT | pSTS045 |
| | ISCRASQDISKYLNWYQQKPDGTVKLLIYHTSRLHSGVPSRFSGSGSGTD | Human |
| | YSLTISNLEQEDIATYFCQQGNTLPYTFGGGTKLEITGGGGSGGGGSGGG | SynNotch1 |
| | GSEVKLQESGPGLVAPSQSLSVTCTVSGVSLPDYGVSWIRQPPRKGLEWL | with PKHD1 |
| | GVIWGSETTYYNSALKSRLTIIKDNSKSQVFLKMNSLQTDDTAIYYCAKH | STS |
| | YYYGGSYAMDYWGQGTSVTVSSILDYSFGGGAGRDIPPPLIEEACELPEC | |
| | QEDAGNKVCSLQCNNHACGWDGGDCSLNFNDPWKNCTQSLQCWKYFS | |
| | DGHCDSQCNSAGCLFDGFDCQRAEGQCNPLYDQYCKDHFSDGHCDQGC | |
| | NSAECEWDGLDCAEHVPERLAAGTLVVVVLMPPEQLRNSSFHFLRELSR | |
| | VLHTNVVFKRDAHGQQMIFPYYGREEELRKHPIKRAAEGWAAPDALLG | |
| | QVKASLLPGGSEGGRRRRELDPMDVRGSIVYLEIDNRQCVQASSQCFQSA | |
| | TDVAAFLGALASLGSLNIPYKIEAVQSETVEPPPPAQLHFMYVAAAAFVL | |
| | LFFVGCGVLLSKRSKSRKTKMKLLSSIEQACDICRLKKLKCSKEKPKCAK | |
| | CLKNNWECRYSPKTKRSPLTRAHLTEVESRLERLEQLFLLIFPREDLDMIL | |
| | KMDSLQDIKALLTGLFVQDNVNKDAVTDRLASVETDMPLTLRQHRISAT | |
| | SSSEESSNKGQRQLTVSAAAGGSGGSGGSDALDDFDLDMLGSDALDDFD | |
| | LDMLGSDALDDFDLDMLGSDALDDFDLDMLGS | |
| 46 | MALPVTALLLPLALLLHAARPEQKLISEEDLDIQMTQTTSSLSASLGDRVT | pSTS046 |
| | ISCRASQDISKYLNWYQQKPDGTVKLLIYHTSRLHSGVPSRFSGSGSGTD | Human |
| | YSLTISNLEQEDIATYFCQQGNTLPYTFGGGTKLEITGGGGSGGGGSGGG | SynNotch1 |
| | GSEVKLQESGPGLVAPSQSLSVTCTVSGVSLPDYGVSWIRQPPRKGLEWL | with NECTIN1 |
| | GVIWGSETTYYNSALKSRLTIIKDNSKSQVFLKMNSLQTDDTAIYYCAKH | STS |
| | YYYGGSYAMDYWGQGTSVTVSSILDYSFGGGAGRDIPPPLIEEACELPEC | |
| | QEDAGNKVCSLQCNNHACGWDGGDCSLNFNDPWKNCTQSLQCWKYFS | |
| | DGHCDSQCNSAGCLFDGFDCQRAEGQCNPLYDQYCKDHFSDGHCDQGC | |
| | NSAECEWDGLDCAEHVPERLAAGTLVVVVLMPPEQLRNSSFHFLRELSR | |
| | VLHTNVVFKRDAHGQQMIFPYYGREEELRKHPIKRAAEGWAAPDALLG | |
| | QVKASLLPGGSEGGRRRRELDPMDVRGSIVYLEIDNRQCVQASSQCFQSA | |
| | TDVAAFLGALASLGSLNIPYKIEAVQSETVEPPPPAQLHFMYVAAAAFVL | |
| | LFFVGCGVLLSRRRRHTFKMKLLSSIEQACDICRLKKLKCSKEKPKCAKC | |
| | LKNNWECRYSPKTKRSPLTRAHLTEVESRLERLEQLFLLIFPREDLDMILK | |
| | MDSLQDIKALLTGLFVQDNVNKDAVTDRLASVETDMPLTLRQHRISATS | |
| | SSEESSNKGQRQLTVSAAAGGSGGSGGSDALDDFDLDMLGSDALDDFDL | |
| | DMLGSDALDDFDLDMLGSDALDDFDLDMLGS | |
| 47 | MALPVTALLLPLALLLHAARPEQKLISEEDLDIQMTQTTSSLSASLGDRVT | pSTS047 |
| | ISCRASQDISKYLNWYQQKPDGTVKLLIYHTSRLHSGVPSRFSGSGSGTD | Human |
| | YSLTISNLEQEDIATYFCQQGNTLPYTFGGGTKLEITGGGGSGGGGSGGG | SynNotch1 |
| | GSEVKLQESGPGLVAPSQSLSVTCTVSGVSLPDYGVSWIRQPPRKGLEWL | with KL STS |
| | GVIWGSETTYYNSALKSRLTIIKDNSKSQVFLKMNSLQTDDTAIYYCAKH | |
| | YYYGGSYAMDYWGQGTSVTVSSILDYSFGGGAGRDIPPPLIEEACELPEC | |
| | QEDAGNKVCSLQCNNHACGWDGGDCSLNFNDPWKNCTQSLQCWKYFS | |
| | DGHCDSQCNSAGCLFDGFDCQRAEGQCNPLYDQYCKDHFSDGHCDQGC | |
| | NSAECEWDGLDCAEHVPERLAAGTLVVVVLMPPEQLRNSSFHFLRELSR | |
| | VLHTNVVFKRDAHGQQMIFPYYGREEELRKHPIKRAAEGWAAPDALLG | |
| | QVKASLLPGGSEGGRRRRELDPMDVRGSIVYLEIDNRQCVQASSQCFQSA | |
| | TDVAAFLGALASLGSLNIPYKIEAVQSETVEPPPPAQLHFMYVAAAAFVL | |
| | LFFVGCGVLLSKKGRRSYKMKLLSSIEQACDICRLKKLKCSKEKPKCAKC | |
| | LKNNWECRYSPKTKRSPLTRAHLTEVESRLERLEQLFLLIFPREDLDMILK | |
| | MDSLQDIKALLTGLFVQDNVNKDAVTDRLASVETDMPLTLRQHRISATS | |
| | SSEESSNKGQRQLTVSAAAGGSGGSGGSDALDDFDLDMLGSDALDDFDL | |
| | DMLGSDALDDFDLDMLGSDALDDFDLDMLGS | |
| 48 | MALPVTALLLPLALLLHAARPEQKLISEEDLDIQMTQTTSSLSASLGDRVT | pSTS048 |
| | ISCRASQDISKYLNWYQQKPDGTVKLLIYHTSRLHSGVPSRFSGSGSGTD | Human |
| | YSLTISNLEQEDIATYFCQQGNTLPYTFGGGTKLEITGGGGSGGGGSGGG | SynNotch1 |
| | GSEVKLQESGPGLVAPSQSLSVTCTVSGVSLPDYGVSWIRQPPRKGLEWL | with IL6R STS |
| | GVIWGSETTYYNSALKSRLTIIKDNSKSQVFLKMNSLQTDDTAIYYCAKH | |
| | YYYGGSYAMDYWGQGTSVTVSSILDYSFGGGAGRDIPPPLIEEACELPEC | |
| | QEDAGNKVCSLQCNNHACGWDGGDCSLNFNDPWKNCTQSLQCWKYFS | |
| | DGHCDSQCNSAGCLFDGFDCQRAEGQCNPLYDQYCKDHFSDGHCDQGC | |
| | NSAECEWDGLDCAEHVPERLAAGTLVVVVLMPPEQLRNSSFHFLRELSR | |
| | VLHTNVVFKRDAHGQQMIFPYYGREEELRKHPIKRAAEGWAAPDALLG | |
| | QVKASLLPGGSEGGRRRRELDPMDVRGSIVYLEIDNRQCVQASSQCFQSA | |
| | TDVAAFLGALASLGSLNIPYKIEAVQSETVEPPPPAQLHFMYVAAAAFVL | |
| | LFFVGCGVLLSRFKKTWKLRALKEGKMKLLSSIEQACDICRLKKLKCSKE | |
| | KPKCAKCLKNNWECRYSPKTKRSPLTRAHLTEVESRLERLEQLFLLIFPRE | |
| | DLDMILKMDSLQDIKALLTGLFVQDNVNKDAVTDRLASVETDMPLTLRQ | |
| | HRISATSSSEESSNKGQRQLTVSAAAGGSGGSGGSDALDDFDLDMLGSD | |
| | ALDDFDLDMLGSDALDDFDLDMLGSDALDDFDLDMLGS | |
| 49 | MALPVTALLLPLALLLHAARPEQKLISEEDLDIQMTQTTSSLSASLGDRVT | pSTS049 |
| | ISCRASQDISKYLNWYQQKPDGTVKLLIYHTSRLHSGVPSRFSGSGSGTD | Human |
| | YSLTISNLEQEDIATYFCQQGNTLPYTFGGGTKLEITGGGGSGGGGSGGG | SynNotch1 |
| | GSEVKLQESGPGLVAPSQSLSVTCTVSGVSLPDYGVSWIRQPPRKGLEWL | with EFNB1 |
| | GVIWGSETTYYNSALKSRLTIIKDNSKSQVFLKMNSLQTDDTAIYYCAKH | STS |
| | YYYGGSYAMDYWGQGTSVTVSSILDYSFGGGAGRDIPPPLIEEACELPEC | |
| | QEDAGNKVCSLQCNNHACGWDGGDCSLNFNDPWKNCTQSLQCWKYFS | |
| | DGHCDSQCNSAGCLFDGFDCQRAEGQCNPLYDQYCKDHFSDGHCDQGC | |
| | NSAECEWDGLDCAEHVPERLAAGTLVVVVLMPPEQLRNSSFHFLRELSR | |
| | VLHTNVVFKRDAHGQQMIFPYYGREEELRKHPIKRAAEGWAAPDALLG | |
| | QVKASLLPGGSEGGRRRRELDPMDVRGSIVYLEIDNRQCVQASSQCFQSA | |
| | TDVAAFLGALASLGSLNIPYKIEAVQSETVEPPPPAQLHFMYVAAAAFVL | |
| | LFFVGCGVLLSKLRKRHRKHMKLLSSIEQACDICRLKKLKCSKEKPKCAK | |
| | CLKNNWECRYSPKTKRSPLTRAHLTEVESRLERLEQLFLLIFPREDLDMIL | |
| | KMDSLQDIKALLTGLFVQDNVNKDAVTDRLASVETDMPLTLRQHRISAT | |
| | SSSEESSNKGQRQLTVSAAAGGSGGSGGSDALDDFDLDMLGSDALDDFD | |
| | LDMLGSDALDDFDLDMLGSDALDDFDLDMLGS | |
| 50 | MALPVTALLLPLALLLHAARPEQKLISEEDLDIQMTQTTSSLSASLGDRVT | pSTS050 |
| | ISCRASQDISKYLNWYQQKPDGTVKLLIYHTSRLHSGVPSRFSGSGSGTD | Human |
| | YSLTISNLEQEDIATYFCQQGNTLPYTFGGGTKLEITGGGGSGGGGSGGG | SynNotch1 |
| | GSEVKLQESGPGLVAPSQSLSVTCTVSGVSLPDYGVSWIRQPPRKGLEWL | with CD44 |
| | GVIWGSETTYYNSALKSRLTIIKDNSKSQVFLKMNSLQTDDTAIYYCAKH | STS |
| | YYYGGSYAMDYWGQGTSVTVSSILDYSFGGGAGRDIPPPLIEEACELPEC | |
| | QEDAGNKVCSLQCNNHACGWDGGDCSLNFNDPWKNCTQSLQCWKYFS | |
| | DGHCDSQCNSAGCLFDGFDCQRAEGQCNPLYDQYCKDHFSDGHCDQGC | |
| | NSAECEWDGLDCAEHVPERLAAGTLVVVVLMPPEQLRNSSFHFLRELSR | |
| | VLHTNVVFKRDAHGQQMIFPYYGREEELRKHPIKRAAEGWAAPDALLG | |
| | QVKASLLPGGSEGGRRRRELDPMDVRGSIVYLEIDNRQCVQASSQCFQSA | |
| | TDVAAFLGALASLGSLNIPYKIEAVQSETVEPPPPAQLHFMYVAAAAFVL | |
| | LFFVGCGVLLSRRRCGQKKKMKLLSSIEQACDICRLKKLKCSKEKPKCAK | |
| | CLKNNWECRYSPKTKRSPLTRAHLTEVESRLERLEQLFLLIFPREDLDMIL | |
| | KMDSLQDIKALLTGLFVQDNVNKDAVTDRLASVETDMPLTLRQHRISAT | |
| | SSSEESSNKGQRQLTVSAAAGGSGGSGGSDALDDFDLDMLGSDALDDFD | |
| | LDMLGSDALDDFDLDMLGSDALDDFDLDMLGS | |
| 51 | MALPVTALLLPLALLLHAARPEQKLISEEDLDIQMTQTTSSLSASLGDRVT | pSTS051 |
| | ISCRASQDISKYLNWYQQKPDGTVKLLIYHTSRLHSGVPSRFSGSGSGTD | Human |
| | YSLTISNLEQEDIATYFCQQGNTLPYTFGGGTKLEITGGGGSGGGGSGGG | SynNotch1 |
| | GSEVKLQESGPGLVAPSQSLSVTCTVSGVSLPDYGVSWIRQPPRKGLEWL | with CLSTN1 |
| | GVIWGSETTYYNSALKSRLTIIKDNSKSQVFLKMNSLQTDDTAIYYCAKH | STS |
| | YYYGGSYAMDYWGQGTSVTVSSILDYSFGGGAGRDIPPPLIEEACELPEC | |
| | QEDAGNKVCSLQCNNHACGWDGGDCSLNFNDPWKNCTQSLQCWKYFS | |
| | DGHCDSQCNSAGCLFDGFDCQRAEGQCNPLYDQYCKDHFSDGHCDQGC | |
| | NSAECEWDGLDCAEHVPERLAAGTLVVVVLMPPEQLRNSSFHFLRELSR | |
| | VLHTNVVFKRDAHGQQMIFPYYGREEELRKHPIKRAAEGWAAPDALLG | |
| | QVKASLLPGGSEGGRRRRELDPMDVRGSIVYLEIDNRQCVQASSQCFQSA | |
| | TDVAAFLGALASLGSLNIPYKIEAVQSETVEPPPPAQLHFMYVAAAAFVL | |
| | LFFVGCGVLLSRIRAAHRRTMRMKLLSSIEQACDICRLKKLKCSKEKPKC | |
| | AKCLKNNWECRYSPKTKRSPLTRAHLTEVESRLERLEQLFLLIFPREDLD | |
| | MILKMDSLQDIKALLTGLFVQDNVNKDAVTDRLASVETDMPLTLRQHRI | |
| | SATSSSEESSNKGQRQLTVSAAAGGSGGSGGSDALDDFDLDMLGSDALD | |
| | DFDLDMLGSDALDDFDLDMLGSDALDDFDLDMLGS | |
| 52 | MALPVTALLLPLALLLHAARPEQKLISEEDLDIQMTQTTSSLSASLGDRVT | pSTS052 |
| | ISCRASQDISKYLNWYQQKPDGTVKLLIYHTSRLHSGVPSRFSGSGSGTD | Human |
| | YSLTISNLEQEDIATYFCQQGNTLPYTFGGGTKLEITGGGGSGGGGSGGG | SynNotch1 |
| | GSEVKLQESGPGLVAPSQSLSVTCTVSGVSLPDYGVSWIRQPPRKGLEWL | with LRP8 |
| | GVIWGSETTYYNSALKSRLTIIKDNSKSQVFLKMNSLQTDDTAIYYCAKH | STS |
| | YYYGGSYAMDYWGQGTSVTVSSILDYSFGGGAGRDIPPPLIEEACELPEC | |
| | QEDAGNKVCSLQCNNHACGWDGGDCSLNFNDPWKNCTQSLQCWKYFS | |
| | DGHCDSQCNSAGCLFDGFDCQRAEGQCNPLYDQYCKDHFSDGHCDQGC | |
| | NSAECEWDGLDCAEHVPERLAAGTLVVVVLMPPEQLRNSSFHFLRELSR | |
| | VLHTNVVFKRDAHGQQMIFPYYGREEELRKHPIKRAAEGWAAPDALLG | |
| | QVKASLLPGGSEGGRRRRELDPMDVRGSIVYLEIDNRQCVQASSQCFQSA | |
| | TDVAAFLGALASLGSLNIPYKIEAVQSETVEPPPPAQLHFMYVAAAAFVL | |
| | LFFVGCGVLLSRNWKRKNTKMKLLSSIEQACDICRLKKLKCSKEKPKCA | |
| | KCLKNNWECRYSPKTKRSPLTRAHLTEVESRLERLEQLFLLIFPREDLDMI | |
| | LKMDSLQDIKALLTGLFVQDNVNKDAVTDRLASVETDMPLTLRQHRISA | |
| | TSSSEESSNKGQRQLTVSAAAGGSGGSGGSDALDDFDLDMLGSDALDDF | |
| | DLDMLGSDALDDFDLDMLGSDALDDFDLDMLGS | |
| 53 | MALPVTALLLPLALLLHAARPEQKLISEEDLDIQMTQTTSSLSASLGDRVT | pSTS053 |
| | ISCRASQDISKYLNWYQQKPDGTVKLLIYHTSRLHSGVPSRFSGSGSGTD | Human |
| | YSLTISNLEQEDIATYFCQQGNTLPYTFGGGTKLEITGGGGSGGGGSGGG | SynNotch1 |
| | GSEVKLQESGPGLVAPSQSLSVTCTVSGVSLPDYGVSWIRQPPRKGLEWL | with |
| | GVIWGSETTYYNSALKSRLTIIKDNSKSQVFLKMNSLQTDDTAIYYCAKH | PCDHGC3 |
| | YYYGGSYAMDYWGQGTSVTVSSILDYSFGGGAGRDIPPPLIEEACELPEC | STS |
| | QEDAGNKVCSLQCNNHACGWDGGDCSLNFNDPWKNCTQSLQCWKYFS | |
| | DGHCDSQCNSAGCLFDGFDCQRAEGQCNPLYDQYCKDHFSDGHCDQGC | |
| | NSAECEWDGLDCAEHVPERLAAGTLVVVVLMPPEQLRNSSFHFLRELSR | |
| | VLHTNVVFKRDAHGQQMIFPYYGREEELRKHPIKRAAEGWAAPDALLG | |
| | QVKASLLPGGSEGGRRRRELDPMDVRGSIVYLEIDNRQCVQASSQCFQSA | |
| | TDVAAFLGALASLGSLNIPYKIEAVQSETVEPPPPAQLHFMYVAAAAFVL | |
| | LFFVGCGVLLSKVYKWKQSRMKLLSSIEQACDICRLKKLKCSKEKPKCA | |
| | KCLKNNWECRYSPKTKRSPLTRAHLTEVESRLERLEQLFLLIFPREDLDMI | |
| | LKMDSLQDIKALLTGLFVQDNVNKDAVTDRLASVETDMPLTLRQHRISA | |
| | TSSSEESSNKGQRQLTVSAAAGGSGGSGGSDALDDFDLDMLGSDALDDF | |
| | DLDMLGSDALDDFDLDMLGSDALDDFDLDMLGS | |
| 54 | MALPVTALLLPLALLLHAARPEQKLISEEDLDIQMTQTTSSLSASLGDRVT | pSTS054 |
| | ISCRASQDISKYLNWYQQKPDGTVKLLIYHTSRLHSGVPSRFSGSGSGTD | Human |
| | YSLTISNLEQEDIATYFCQQGNTLPYTFGGGTKLEITGGGGSGGGGSGGG | SynNotch1 |
| | GSEVKLQESGPGLVAPSQSLSVTCTVSGVSLPDYGVSWIRQPPRKGLEWL | with NRG1 |
| | GVIWGSETTYYNSALKSRLTIIKDNSKSQVFLKMNSLQTDDTAIYYCAKH | STS |
| | YYYGGSYAMDYWGQGTSVTVSSILDYSFGGGAGRDIPPPLIEEACELPEC | |
| | QEDAGNKVCSLQCNNHACGWDGGDCSLNFNDPWKNCTQSLQCWKYFS | |
| | DGHCDSQCNSAGCLFDGFDCQRAEGQCNPLYDQYCKDHFSDGHCDQGC | |
| | NSAECEWDGLDCAEHVPERLAAGTLVVVVLMPPEQLRNSSFHFLRELSR | |
| | VLHTNVVFKRDAHGQQMIFPYYGREEELRKHPIKRAAEGWAAPDALLG | |
| | QVKASLLPGGSEGGRRRRELDPMDVRGSIVYLEIDNRQCVQASSQCFQSA | |
| | TDVAAFLGALASLGSLNIPYKIEAVQSETVEPPPPAQLHFMYVAAAAFVL | |
| | LFFVGCGVLLSKTKKQRKKLHDRLRMKLLSSIEQACDICRLKKLKCSKEK | |
| | PKCAKCLKNNWECRYSPKTKRSPLTRAHLTEVESRLERLEQLFLLIFPRED | |
| | LDMILKMDSLQDIKALLTGLFVQDNVNKDAVTDRLASVETDMPLTLRQH | |
| | RISATSSSEESSNKGQRQLTVSAAAGGSGGSGGSDALDDFDLDMLGSDAL | |
| | DDFDLDMLGSDALDDFDLDMLGSDALDDFDLDMLGS | |
| 55 | MALPVTALLLPLALLLHAARPEQKLISEEDLDIQMTQTTSSLSASLGDRVT | pSTS055 |
| | ISCRASQDISKYLNWYQQKPDGTVKLLIYHTSRLHSGVPSRFSGSGSGTD | Human |
| | YSLTISNLEQEDIATYFCQQGNTLPYTFGGGTKLEITGGGGSGGGGSGGG | SynNotch1 |
| | GSEVKLQESGPGLVAPSQSLSVTCTVSGVSLPDYGVSWIRQPPRKGLEWL | with LRP1B |
| | GVIWGSETTYYNSALKSRLTIIKDNSKSQVFLKMNSLQTDDTAIYYCAKH | STS |
| | YYYGGSYAMDYWGQGTSVTVSSILDYSFGGGAGRDIPPPLIEEACELPEC | |
| | QEDAGNKVCSLQCNNHACGWDGGDCSLNFNDPWKNCTQSLQCWKYFS | |
| | DGHCDSQCNSAGCLFDGFDCQRAEGQCNPLYDQYCKDHFSDGHCDQGC | |
| | NSAECEWDGLDCAEHVPERLAAGTLVVVVLMPPEQLRNSSFHFLRELSR | |
| | VLHTNVVFKRDAHGQQMIFPYYGREEELRKHPIKRAAEGWAAPDALLG | |
| | QVKASLLPGGSEGGRRRRELDPMDVRGSIVYLEIDNRQCVQASSQCFQSA | |
| | TDVAAFLGALASLGSLNIPYKIEAVQSETVEPPPPAQLHFMYVAAAAFVL | |
| | LFFVGCGVLLSKRKRRTKTIRRMKLLSSIEQACDICRLKKLKCSKEKPKC | |
| | AKCLKNNWECRYSPKTKRSPLTRAHLTEVESRLERLEQLFLLIFPREDLD | |
| | MILKMDSLQDIKALLTGLFVQDNVNKDAVTDRLASVETDMPLTLRQHRI | |
| | SATSSSEESSNKGQRQLTVSAAAGGSGGSGGSDALDDFDLDMLGSDALD | |
| | DFDLDMLGSDALDDFDLDMLGSDALDDFDLDMLGS | |
| 56 | MALPVTALLLPLALLLHAARPEQKLISEEDLDIQMTQTTSSLSASLGDRVT | pSTS056 |
| | ISCRASQDISKYLNWYQQKPDGTVKLLIYHTSRLHSGVPSRFSGSGSGTD | Human |
| | YSLTISNLEQEDIATYFCQQGNTLPYTFGGGTKLEITGGGGSGGGGSGGG | SynNotch1 |
| | GSEVKLQESGPGLVAPSQSLSVTCTVSGVSLPDYGVSWIRQPPRKGLEWL | with JAG2 |
| | GVIWGSETTYYNSALKSRLTIIKDNSKSQVFLKMNSLQTDDTAIYYCAKH | STS |
| | YYYGGSYAMDYWGQGTSVTVSSILDYSFGGGAGRDIPPPLIEEACELPEC | |
| | QEDAGNKVCSLQCNNHACGWDGGDCSLNFNDPWKNCTQSLQCWKYFS | |
| | DGHCDSQCNSAGCLFDGFDCQRAEGQCNPLYDQYCKDHFSDGHCDQGC | |
| | NSAECEWDGLDCAEHVPERLAAGTLVVVVLMPPEQLRNSSFHFLRELSR | |
| | VLHTNVVFKRDAHGQQMIFPYYGREEELRKHPIKRAAEGWAAPDALLG | |
| | QVKASLLPGGSEGGRRRRELDPMDVRGSIVYLEIDNRQCVQASSQCFQSA | |
| | TDVAAFLGALASLGSLNIPYKIEAVQSETVEPPPPAQLHFMYVAAAAFVL | |
| | LFFVGCGVLLSRKRRKERERSRLPRMKLLSSIEQACDICRLKKLKCSKEKP | |
| | KCAKCLKNNWECRYSPKTKRSPLTRAHLTEVESRLERLEQLFLLIFPRED | |
| | LDMILKMDSLQDIKALLTGLFVQDNVNKDAVTDRLASVETDMPLTLRQH | |
| | RISATSSSEESSNKGQRQLTVSAAAGGSGGSGGSDALDDFDLDMLGSDAL | |
| | DDFDLDMLGSDALDDFDLDMLGSDALDDFDLDMLGS | |
| 57 | MALPVTALLLPLALLLHAARPEQKLISEEDLDIQMTQTTSSLSASLGDRVT | pSTS057 |
| | ISCRASQDISKYLNWYQQKPDGTVKLLIYHTSRLHSGVPSRFSGSGSGTD | Human |
| | YSLTISNLEQEDIATYFCQQGNTLPYTFGGGTKLEITGGGGSGGGGSGGG | SynNotch1 |
| | GSEVKLQESGPGLVAPSQSLSVTCTVSGVSLPDYGVSWIRQPPRKGLEWL | with EFNB2 |
| | GVIWGSETTYYNSALKSRLTIIKDNSKSQVFLKMNSLQTDDTAIYYCAKH | STS |
| | YYYGGSYAMDYWGQGTSVTVSSILDYSFGGGAGRDIPPPLIEEACELPEC | |
| | QEDAGNKVCSLQCNNHACGWDGGDCSLNFNDPWKNCTQSLQCWKYFS | |
| | DGHCDSQCNSAGCLFDGFDCQRAEGQCNPLYDQYCKDHFSDGHCDQGC | |
| | NSAECEWDGLDCAEHVPERLAAGTLVVVVLMPPEQLRNSSFHFLRELSR | |
| | VLHTNVVFKRDAHGQQMIFPYYGREEELRKHPIKRAAEGWAAPDALLG | |
| | QVKASLLPGGSEGGRRRRELDPMDVRGSIVYLEIDNRQCVQASSQCFQSA | |
| | TDVAAFLGALASLGSLNIPYKIEAVQSETVEPPPPAQLHFMYVAAAAFVL | |
| | LFFVGCGVLLSKYRRRHRKHMKLLSSIEQACDICRLKKLKCSKEKPKCAK | |
| | CLKNNWECRYSPKTKRSPLTRAHLTEVESRLERLEQLFLLIFPREDLDMIL | |
| | KMDSLQDIKALLTGLFVQDNVNKDAVTDRLASVETDMPLTLRQHRISAT | |
| | SSSEESSNKGQRQLTVSAAAGGSGGSGGSDALDDFDLDMLGSDALDDFD | |
| | LDMLGSDALDDFDLDMLGSDALDDFDLDMLGS | |
| 58 | MALPVTALLLPLALLLHAARPEQKLISEEDLDIQMTQTTSSLSASLGDRVT | pSTS058 |
| | ISCRASQDISKYLNWYQQKPDGTVKLLIYHTSRLHSGVPSRFSGSGSGTD | Human |
| | YSLTISNLEQEDIATYFCQQGNTLPYTFGGGTKLEITGGGGSGGGGSGGG | SynNotch1 |
| | GSEVKLQESGPGLVAPSQSLSVTCTVSGVSLPDYGVSWIRQPPRKGLEWL | with DLL1 |
| | GVIWGSETTYYNSALKSRLTIIKDNSKSQVFLKMNSLQTDDTAIYYCAKH | STS |
| | YYYGGSYAMDYWGQGTSVTVSSILDYSFGGGAGRDIPPPLIEEACELPEC | |
| | QEDAGNKVCSLQCNNHACGWDGGDCSLNFNDPWKNCTQSLQCWKYFS | |
| | DGHCDSQCNSAGCLFDGFDCQRAEGQCNPLYDQYCKDHFSDGHCDQGC | |
| | NSAECEWDGLDCAEHVPERLAAGTLVVVVLMPPEQLRNSSFHFLRELSR | |
| | VLHTNVVFKRDAHGQQMIFPYYGREEELRKHPIKRAAEGWAAPDALLG | |
| | QVKASLLPGGSEGGRRRRELDPMDVRGSIVYLEIDNRQCVQASSQCFQSA | |
| | TDVAAFLGALASLGSLNIPYKIEAVQSETVEPPPPAQLHFMYVAAAAFVL | |
| | LFFVGCGVLLSRLRLQKHRMKLLSSIEQACDICRLKKLKCSKEKPKCAKC | |
| | LKNNWECRYSPKTKRSPLTRAHLTEVESRLERLEQLFLLIFPREDLDMILK | |
| | MDSLQDIKALLTGLFVQDNVNKDAVTDRLASVETDMPLTLRQHRISATS | |
| | SSEESSNKGQRQLTVSAAAGGSGGSGGSDALDDFDLDMLGSDALDDFDL | |
| | DMLGSDALDDFDLDMLGSDALDDFDLDMLGS | |
| 59 | MALPVTALLLPLALLLHAARPEQKLISEEDLDIQMTQTTSSLSASLGDRVT | pSTS059 |
| | ISCRASQDISKYLNWYQQKPDGTVKLLIYHTSRLHSGVPSRFSGSGSGTD | Human |
| | YSLTISNLEQEDIATYFCQQGNTLPYTFGGGTKLEITGGGGSGGGGSGGG | SynNotch1 |
| | GSEVKLQESGPGLVAPSQSLSVTCTVSGVSLPDYGVSWIRQPPRKGLEWL | with CLSTN2 |
| | GVIWGSETTYYNSALKSRLTIIKDNSKSQVFLKMNSLQTDDTAIYYCAKH | STS |
| | YYYGGSYAMDYWGQGTSVTVSSILDYSFGGGAGRDIPPPLIEEACELPEC | |
| | QEDAGNKVCSLQCNNHACGWDGGDCSLNFNDPWKNCTQSLQCWKYFS | |
| | DGHCDSQCNSAGCLFDGFDCQRAEGQCNPLYDQYCKDHFSDGHCDQGC | |
| | NSAECEWDGLDCAEHVPERLAAGTLVVVVLMPPEQLRNSSFHFLRELSR | |
| | VLHTNVVFKRDAHGQQMIFPYYGREEELRKHPIKRAAEGWAAPDALLG | |
| | QVKASLLPGGSEGGRRRRELDPMDVRGSIVYLEIDNRQCVQASSQCFQSA | |
| | TDVAAFLGALASLGSLNIPYKIEAVQSETVEPPPPAQLHFMYVAAAAFVL | |
| | LFFVGCGVLLSRVRIAHQHMKLLSSIEQACDICRLKKLKCSKEKPKCAKC | |
| | LKNNWECRYSPKTKRSPLTRAHLTEVESRLERLEQLFLLIFPREDLDMILK | |
| | MDSLQDIKALLTGLFVQDNVNKDAVTDRLASVETDMPLTLRQHRISATS | |
| | SSEESSNKGQRQLTVSAAAGGSGGSGGSDALDDFDLDMLGSDALDDFDL | |
| | DMLGSDALDDFDLDMLGSDALDDFDLDMLGS | |
| 60 | MALPVTALLLPLALLLHAARPEQKLISEEDLDIQMTQTTSSLSASLGDRVT | pSTS060 |
| | ISCRASQDISKYLNWYQQKPDGTVKLLIYHTSRLHSGVPSRFSGSGSGTD | Human |
| | YSLTISNLEQEDIATYFCQQGNTLPYTFGGGTKLEITGGGGSGGGGSGGG | SynNotch1 |
| | GSEVKLQESGPGLVAPSQSLSVTCTVSGVSLPDYGVSWIRQPPRKGLEWL | with EPCAM |
| | GVIWGSETTYYNSALKSRLTIIKDNSKSQVFLKMNSLQTDDTAIYYCAKH | STS |
| | YYYGGSYAMDYWGQGTSVTVSSILDYSFGGGAGRDIPPPLIEEACELPEC | |
| | QEDAGNKVCSLQCNNHACGWDGGDCSLNFNDPWKNCTQSLQCWKYFS | |
| | DGHCDSQCNSAGCLFDGFDCQRAEGQCNPLYDQYCKDHFSDGHCDQGC | |
| | NSAECEWDGLDCAEHVPERLAAGTLVVVVLMPPEQLRNSSFHFLRELSR | |
| | VLHTNVVFKRDAHGQQMIFPYYGREEELRKHPIKRAAEGWAAPDALLG | |
| | QVKASLLPGGSEGGRRRRELDPMDVRGSIVYLEIDNRQCVQASSQCFQSA | |
| | TDVAAFLGALASLGSLNIPYKIEAVQSETVEPPPPAQLHFMYVAAAAFVL | |
| | LFFVGCGVLLSRKKRMAKYEKMKLLSSIEQACDICRLKKLKCSKEKPKC | |
| | AKCLKNNWECRYSPKTKRSPLTRAHLTEVESRLERLEQLFLLIFPREDLD | |
| | MILKMDSLQDIKALLTGLFVQDNVNKDAVTDRLASVETDMPLTLRQHRI | |
| | SATSSSEESSNKGQRQLTVSAAAGGSGGSGGSDALDDFDLDMLGSDALD | |
| | DFDLDMLGSDALDDFDLDMLGSDALDDFDLDMLGS | |
| 61 | MALPVTALLLPLALLLHAARPEQKLISEEDLDIQMTQTTSSLSASLGDRVT | pSTS061 |
| | ISCRASQDISKYLNWYQQKPDGTVKLLIYHTSRLHSGVPSRFSGSGSGTD | Human |
| | YSLTISNLEQEDIATYFCQQGNTLPYTFGGGTKLEITGGGGSGGGGSGGG | SynNotch1 |
| | GSEVKLQESGPGLVAPSQSLSVTCTVSGVSLPDYGVSWIRQPPRKGLEWL | with ErbB4 |
| | GVIWGSETTYYNSALKSRLTIIKDNSKSQVFLKMNSLQTDDTAIYYCAKH | STS |
| | YYYGGSYAMDYWGQGTSVTVSSILDYSFGGGAGRDIPPPLIEEACELPEC | |
| | QEDAGNKVCSLQCNNHACGWDGGDCSLNFNDPWKNCTQSLQCWKYFS | |
| | DGHCDSQCNSAGCLFDGFDCQRAEGQCNPLYDQYCKDHFSDGHCDQGC | |
| | NSAECEWDGLDCAEHVPERLAAGTLVVVVLMPPEQLRNSSFHFLRELSR | |
| | VLHTNVVFKRDAHGQQMIFPYYGREEELRKHPIKRAAEGWAAPDALLG | |
| | QVKASLLPGGSEGGRRRRELDPMDVRGSIVYLEIDNRQCVQASSQCFQSA | |
| | TDVAAFLGALASLGSLNIPYKIEAVQSETVEPPPPAQLHFMYVAAAAFVL | |
| | LFFVGCGVLLSRRKSIKKKRALRRMKLLSSIEQACDICRLKKLKCSKEKP | |
| | KCAKCLKNNWECRYSPKTKRSPLTRAHLTEVESRLERLEQLFLLIFPRED | |
| | LDMILKMDSLQDIKALLTGLFVQDNVNKDAVTDRLASVETDMPLTLRQH | |
| | RISATSSSEESSNKGQRQLTVSAAAGGSGGSGGSDALDDFDLDMLGSDAL | |
| | DDFDLDMLGSDALDDFDLDMLGSDALDDFDLDMLGS | |
| 62 | MALPVTALLLPLALLLHAARPEQKLISEEDLDIQMTQTTSSLSASLGDRVT | pSTS062 |
| | ISCRASQDISKYLNWYQQKPDGTVKLLIYHTSRLHSGVPSRFSGSGSGTD | Human |
| | YSLTISNLEQEDIATYFCQQGNTLPYTFGGGTKLEITGGGGSGGGGSGGG | SynNotch1 |
| | GSEVKLQESGPGLVAPSQSLSVTCTVSGVSLPDYGVSWIRQPPRKGLEWL | with KCNE3 |
| | GVIWGSETTYYNSALKSRLTIIKDNSKSQVFLKMNSLQTDDTAIYYCAKH | STS |
| | YYYGGSYAMDYWGQGTSVTVSSILDYSFGGGAGRDIPPPLIEEACELPEC | |
| | QEDAGNKVCSLQCNNHACGWDGGDCSLNFNDPWKNCTQSLQCWKYFS | |
| | DGHCDSQCNSAGCLFDGFDCQRAEGQCNPLYDQYCKDHFSDGHCDQGC | |
| | NSAECEWDGLDCAEHVPERLAAGTLVVVVLMPPEQLRNSSFHFLRELSR | |
| | VLHTNVVFKRDAHGQQMIFPYYGREEELRKHPIKRAAEGWAAPDALLG | |
| | QVKASLLPGGSEGGRRRRELDPMDVRGSIVYLEIDNRQCVQASSQCFQSA | |
| | TDVAAFLGALASLGSLNIPYKIEAVQSETVEPPPPAQLHFMYVAAAAFVL | |
| | LFFVGCGVLLSRSRKVDKRMKLLSSIEQACDICRLKKLKCSKEKPKCAKC | |
| | LKNNWECRYSPKTKRSPLTRAHLTEVESRLERLEQLFLLIFPREDLDMILK | |
| | MDSLQDIKALLTGLFVQDNVNKDAVTDRLASVETDMPLTLRQHRISATS | |
| | SSEESSNKGQRQLTVSAAAGGSGGSGGSDALDDFDLDMLGSDALDDFDL | |
| | DMLGSDALDDFDLDMLGSDALDDFDLDMLGS | |
| 63 | MALPVTALLLPLALLLHAARPEQKLISEEDLDIQMTQTTSSLSASLGDRVT | pSTS063 |
| | ISCRASQDISKYLNWYQQKPDGTVKLLIYHTSRLHSGVPSRFSGSGSGTD | Human |
| | YSLTISNLEQEDIATYFCQQGNTLPYTFGGGTKLEITGGGGSGGGGSGGG | SynNotch1 |
| | GSEVKLQESGPGLVAPSQSLSVTCTVSGVSLPDYGVSWIRQPPRKGLEWL | with CDH2 |
| | GVIWGSETTYYNSALKSRLTIIKDNSKSQVFLKMNSLQTDDTAIYYCAKH | STS |
| | YYYGGSYAMDYWGQGTSVTVSSILDYSFGGGAGRDIPPPLIEEACELPEC | |
| | QEDAGNKVCSLQCNNHACGWDGGDCSLNFNDPWKNCTQSLQCWKYFS | |
| | DGHCDSQCNSAGCLFDGFDCQRAEGQCNPLYDQYCKDHFSDGHCDQGC | |
| | NSAECEWDGLDCAEHVPERLAAGTLVVVVLMPPEQLRNSSFHFLRELSR | |
| | VLHTNVVFKRDAHGQQMIFPYYGREEELRKHPIKRAAEGWAAPDALLG | |
| | QVKASLLPGGSEGGRRRRELDPMDVRGSIVYLEIDNRQCVQASSQCFQSA | |
| | TDVAAFLGALASLGSLNIPYKIEAVQSETVEPPPPAQLHFMYVAAAAFVL | |
| | LFFVGCGVLLSKRRDKERQAKMKLLSSIEQACDICRLKKLKCSKEKPKCA | |
| | KCLKNNWECRYSPKTKRSPLTRAHLTEVESRLERLEQLFLLIFPREDLDMI | |
| | LKMDSLQDIKALLTGLFVQDNVNKDAVTDRLASVETDMPLTLRQHRISA | |
| | TSSSEESSNKGQRQLTVSAAAGGSGGSGGSDALDDFDLDMLGSDALDDF | |
| | DLDMLGSDALDDFDLDMLGSDALDDFDLDMLGS | |
| 64 | MALPVTALLLPLALLLHAARPEQKLISEEDLDIQMTQTTSSLSASLGDRVT | pSTS064 |
| | ISCRASQDISKYLNWYQQKPDGTVKLLIYHTSRLHSGVPSRFSGSGSGTD | Human |
| | YSLTISNLEQEDIATYFCQQGNTLPYTFGGGTKLEITGGGGSGGGGSGGG | SynNotch1 |
| | GSEVKLQESGPGLVAPSQSLSVTCTVSGVSLPDYGVSWIRQPPRKGLEWL | with NRG2 |
| | GVIWGSETTYYNSALKSRLTIIKDNSKSQVFLKMNSLQTDDTAIYYCAKH | STS |
| | YYYGGSYAMDYWGQGTSVTVSSILDYSFGGGAGRDIPPPLIEEACELPEC | |
| | QEDAGNKVCSLQCNNHACGWDGGDCSLNFNDPWKNCTQSLQCWKYFS | |
| | DGHCDSQCNSAGCLFDGFDCQRAEGQCNPLYDQYCKDHFSDGHCDQGC | |
| | NSAECEWDGLDCAEHVPERLAAGTLVVVVLMPPEQLRNSSFHFLRELSR | |
| | VLHTNVVFKRDAHGQQMIFPYYGREEELRKHPIKRAAEGWAAPDALLG | |
| | QVKASLLPGGSEGGRRRRELDPMDVRGSIVYLEIDNRQCVQASSQCFQSA | |
| | TDVAAFLGALASLGSLNIPYKIEAVQSETVEPPPPAQLHFMYVAAAAFVL | |
| | LFFVGCGVLLSKTKKQRKQMHNHLRMKLLSSIEQACDICRLKKLKCSKE | |
| | KPKCAKCLKNNWECRYSPKTKRSPLTRAHLTEVESRLERLEQLFLLIFPRE | |
| | DLDMILKMDSLQDIKALLTGLFVQDNVNKDAVTDRLASVETDMPLTLRQ | |
| | HRISATSSSEESSNKGQRQLTVSAAAGGSGGSGGSDALDDFDLDMLGSD | |
| | ALDDFDLDMLGSDALDDFDLDMLGSDALDDFDLDMLGS | |
| 65 | MALPVTALLLPLALLLHAARPEQKLISEEDLDIQMTQTTSSLSASLGDRVT | pSTS065 |
| | ISCRASQDISKYLNWYQQKPDGTVKLLIYHTSRLHSGVPSRFSGSGSGTD | Human |
| | YSLTISNLEQEDIATYFCQQGNTLPYTFGGGTKLEITGGGGSGGGGSGGG | SynNotch1 |
| | GSEVKLQESGPGLVAPSQSLSVTCTVSGVSLPDYGVSWIRQPPRKGLEWL | with PTPRK |
| | GVIWGSETTYYNSALKSRLTIIKDNSKSQVFLKMNSLQTDDTAIYYCAKH | STS |
| | YYYGGSYAMDYWGQGTSVTVSSILDYSFGGGAGRDIPPPLIEEACELPEC | |
| | QEDAGNKVCSLQCNNHACGWDGGDCSLNFNDPWKNCTQSLQCWKYFS | |
| | DGHCDSQCNSAGCLFDGFDCQRAEGQCNPLYDQYCKDHFSDGHCDQGC | |
| | NSAECEWDGLDCAEHVPERLAAGTLVVVVLMPPEQLRNSSFHFLRELSR | |
| | VLHTNVVFKRDAHGQQMIFPYYGREEELRKHPIKRAAEGWAAPDALLG | |
| | QVKASLLPGGSEGGRRRRELDPMDVRGSIVYLEIDNRQCVQASSQCFQSA | |
| | TDVAAFLGALASLGSLNIPYKIEAVQSETVEPPPPAQLHFMYVAAAAFVL | |
| | LFFVGCGVLLSKKSKLAKKRKMKLLSSIEQACDICRLKKLKCSKEKPKCA | |
| | KCLKNNWECRYSPKTKRSPLTRAHLTEVESRLERLEQLFLLIFPREDLDMI | |
| | LKMDSLQDIKALLTGLFVQDNVNKDAVTDRLASVETDMPLTLRQHRISA | |
| | TSSSEESSNKGQRQLTVSAAAGGSGGSGGSDALDDFDLDMLGSDALDDF | |
| | DLDMLGSDALDDFDLDMLGSDALDDFDLDMLGS | |
| 66 | MALPVTALLLPLALLLHAARPEQKLISEEDLDIQMTQTTSSLSASLGDRVT | pSTS066 |
| | ISCRASQDISKYLNWYQQKPDGTVKLLIYHTSRLHSGVPSRFSGSGSGTD | Human |
| | YSLTISNLEQEDIATYFCQQGNTLPYTFGGGTKLEITGGGGSGGGGSGGG | SynNotch1 |
| | GSEVKLQESGPGLVAPSQSLSVTCTVSGVSLPDYGVSWIRQPPRKGLEWL | with BTC STS |
| | GVIWGSETTYYNSALKSRLTIIKDNSKSQVFLKMNSLQTDDTAIYYCAKH | |
| | YYYGGSYAMDYWGQGTSVTVSSILDYSFGGGAGRDIPPPLIEEACELPEC | |
| | QEDAGNKVCSLQCNNHACGWDGGDCSLNFNDPWKNCTQSLQCWKYFS | |
| | DGHCDSQCNSAGCLFDGFDCQRAEGQCNPLYDQYCKDHFSDGHCDQGC | |
| | NSAECEWDGLDCAEHVPERLAAGTLVVVVLMPPEQLRNSSFHFLRELSR | |
| | VLHTNVVFKRDAHGQQMIFPYYGREEELRKHPIKRAAEGWAAPDALLG | |
| | QVKASLLPGGSEGGRRRRELDPMDVRGSIVYLEIDNRQCVQASSQCFQSA | |
| | TDVAAFLGALASLGSLNIPYKIEAVQSETVEPPPPAQLHFMYVAAAAFVL | |
| | LFFVGCGVLLSHPLRKRRKRKKKMKLLSSIEQACDICRLKKLKCSKEKPK | |
| | CAKCLKNNWECRYSPKTKRSPLTRAHLTEVESRLERLEQLFLLIFPREDL | |
| | DMILKMDSLQDIKALLTGLFVQDNVNKDAVTDRLASVETDMPLTLRQH | |
| | RISATSSSEESSNKGQRQLTVSAAAGGSGGSGGSDALDDFDLDMLGSDAL | |
| | DDFDLDMLGSDALDDFDLDMLGSDALDDFDLDMLGS | |
| 67 | MALPVTALLLPLALLLHAARPEQKLISEEDLDIQMTQTTSSLSASLGDRVT | pSTS067 |
| | ISCRASQDISKYLNWYQQKPDGTVKLLIYHTSRLHSGVPSRFSGSGSGTD | Human |
| | YSLTISNLEQEDIATYFCQQGNTLPYTFGGGTKLEITGGGGSGGGGSGGG | SynNotch1 |
| | GSEVKLQESGPGLVAPSQSLSVTCTVSGVSLPDYGVSWIRQPPRKGLEWL | with EPHA4 |
| | GVIWGSETTYYNSALKSRLTIIKDNSKSQVFLKMNSLQTDDTAIYYCAKH | STS |
| | YYYGGSYAMDYWGQGTSVTVSSILDYSFGGGAGRDIPPPLIEEACELPEC | |
| | QEDAGNKVCSLQCNNHACGWDGGDCSLNFNDPWKNCTQSLQCWKYFS | |
| | DGHCDSQCNSAGCLFDGFDCQRAEGQCNPLYDQYCKDHFSDGHCDQGC | |
| | NSAECEWDGLDCAEHVPERLAAGTLVVVVLMPPEQLRNSSFHFLRELSR | |
| | VLHTNVVFKRDAHGQQMIFPYYGREEELRKHPIKRAAEGWAAPDALLG | |
| | QVKASLLPGGSEGGRRRRELDPMDVRGSIVYLEIDNRQCVQASSQCFQSA | |
| | TDVAAFLGALASLGSLNIPYKIEAVQSETVEPPPPAQLHFMYVAAAAFVL | |
| | LFFVGCGVLLSRRRSKYSKAKMKLLSSIEQACDICRLKKLKCSKEKPKCA | |
| | KCLKNNWECRYSPKTKRSPLTRAHLTEVESRLERLEQLFLLIFPREDLDMI | |
| | LKMDSLQDIKALLTGLFVQDNVNKDAVTDRLASVETDMPLTLRQHRISA | |
| | TSSSEESSNKGQRQLTVSAAAGGSGGSGGSDALDDFDLDMLGSDALDDF | |
| | DLDMLGSDALDDFDLDMLGSDALDDFDLDMLGS | |
| 68 | MALPVTALLLPLALLLHAARPEQKLISEEDLDIQMTQTTSSLSASLGDRVT | pSTS068 |
| | ISCRASQDISKYLNWYQQKPDGTVKLLIYHTSRLHSGVPSRFSGSGSGTD | Human |
| | YSLTISNLEQEDIATYFCQQGNTLPYTFGGGTKLEITGGGGSGGGGSGGG | SynNotch1 |
| | GSEVKLQESGPGLVAPSQSLSVTCTVSGVSLPDYGVSWIRQPPRKGLEWL | with IL1R2 |
| | GVIWGSETTYYNSALKSRLTIIKDNSKSQVFLKMNSLQTDDTAIYYCAKH | STS |
| | YYYGGSYAMDYWGQGTSVTVSSILDYSFGGGAGRDIPPPLIEEACELPEC | |
| | QEDAGNKVCSLQCNNHACGWDGGDCSLNFNDPWKNCTQSLQCWKYFS | |
| | DGHCDSQCNSAGCLFDGFDCQRAEGQCNPLYDQYCKDHFSDGHCDQGC | |
| | NSAECEWDGLDCAEHVPERLAAGTLVVVVLMPPEQLRNSSFHFLRELSR | |
| | VLHTNVVFKRDAHGQQMIFPYYGREEELRKHPIKRAAEGWAAPDALLG | |
| | QVKASLLPGGSEGGRRRRELDPMDVRGSIVYLEIDNRQCVQASSQCFQSA | |
| | TDVAAFLGALASLGSLNIPYKIEAVQSETVEPPPPAQLHFMYVAAAAFVL | |
| | LFFVGCGVLLSHRRCKHRTGKMKLLSSIEQACDICRLKKLKCSKEKPKCA | |
| | KCLKNNWECRYSPKTKRSPLTRAHLTEVESRLERLEQLFLLIFPREDLDMI | |
| | LKMDSLQDIKALLTGLFVQDNVNKDAVTDRLASVETDMPLTLRQHRISA | |
| | TSSSEESSNKGQRQLTVSAAAGGSGGSGGSDALDDFDLDMLGSDALDDF | |
| | DLDMLGSDALDDFDLDMLGSDALDDFDLDMLGS | |
| 69 | MALPVTALLLPLALLLHAARPEQKLISEEDLDIQMTQTTSSLSASLGDRVT | pSTS069 |
| | ISCRASQDISKYLNWYQQKPDGTVKLLIYHTSRLHSGVPSRFSGSGSGTD | Human |
| | YSLTISNLEQEDIATYFCQQGNTLPYTFGGGTKLEITGGGGSGGGGSGGG | SynNotch1 |
| | GSEVKLQESGPGLVAPSQSLSVTCTVSGVSLPDYGVSWIRQPPRKGLEWL | with KCNE4 |
| | GVIWGSETTYYNSALKSRLTIIKDNSKSQVFLKMNSLQTDDTAIYYCAKH | STS |
| | YYYGGSYAMDYWGQGTSVTVSSILDYSFGGGAGRDIPPPLIEEACELPEC | |
| | QEDAGNKVCSLQCNNHACGWDGGDCSLNFNDPWKNCTQSLQCWKYFS | |
| | DGHCDSQCNSAGCLFDGFDCQRAEGQCNPLYDQYCKDHFSDGHCDQGC | |
| | NSAECEWDGLDCAEHVPERLAAGTLVVVVLMPPEQLRNSSFHFLRELSR | |
| | VLHTNVVFKRDAHGQQMIFPYYGREEELRKHPIKRAAEGWAAPDALLG | |
| | QVKASLLPGGSEGGRRRRELDPMDVRGSIVYLEIDNRQCVQASSQCFQSA | |
| | TDVAAFLGALASLGSLNIPYKIEAVQSETVEPPPPAQLHFMYVAAAAFVL | |
| | LFFVGCGVLLSKSKRREKKMKLLSSIEQACDICRLKKLKCSKEKPKCAKC | |
| | LKNNWECRYSPKTKRSPLTRAHLTEVESRLERLEQLFLLIFPREDLDMILK | |
| | MDSLQDIKALLTGLFVQDNVNKDAVTDRLASVETDMPLTLRQHRISATS | |
| | SSEESSNKGQRQLTVSAAAGGSGGSGGSDALDDFDLDMLGSDALDDFDL | |
| | DMLGSDALDDFDLDMLGSDALDDFDLDMLGS | |
| 70 | MALPVTALLLPLALLLHAARPEQKLISEEDLDIQMTQTTSSLSASLGDRVT | pSTS070 |
| | ISCRASQDISKYLNWYQQKPDGTVKLLIYHTSRLHSGVPSRFSGSGSGTD | Human |
| | YSLTISNLEQEDIATYFCQQGNTLPYTFGGGTKLEITGGGGSGGGGSGGG | SynNotch1 |
| | GSEVKLQESGPGLVAPSQSLSVTCTVSGVSLPDYGVSWIRQPPRKGLEWL | with SCN2B |
| | GVIWGSETTYYNSALKSRLTIIKDNSKSQVFLKMNSLQTDDTAIYYCAKH | STS |
| | YYYGGSYAMDYWGQGTSVTVSSILDYSFGGGAGRDIPPPLIEEACELPEC | |
| | QEDAGNKVCSLQCNNHACGWDGGDCSLNFNDPWKNCTQSLQCWKYFS | |
| | DGHCDSQCNSAGCLFDGFDCQRAEGQCNPLYDQYCKDHFSDGHCDQGC | |
| | NSAECEWDGLDCAEHVPERLAAGTLVVVVLMPPEQLRNSSFHFLRELSR | |
| | VLHTNVVFKRDAHGQQMIFPYYGREEELRKHPIKRAAEGWAAPDALLG | |
| | QVKASLLPGGSEGGRRRRELDPMDVRGSIVYLEIDNRQCVQASSQCFQSA | |
| | TDVAAFLGALASLGSLNIPYKIEAVQSETVEPPPPAQLHFMYVAAAAFVL | |
| | LFFVGCGVLLSKCVRRKKEQKMKLLSSIEQACDICRLKKLKCSKEKPKCA | |
| | KCLKNNWECRYSPKTKRSPLTRAHLTEVESRLERLEQLFLLIFPREDLDMI | |
| | LKMDSLQDIKALLTGLFVQDNVNKDAVTDRLASVETDMPLTLRQHRISA | |
| | TSSSEESSNKGQRQLTVSAAAGGSGGSGGSDALDDFDLDMLGSDALDDF | |
| | DLDMLGSDALDDFDLDMLGSDALDDFDLDMLGS | |
| 71 | MALPVTALLLPLALLLHAARPEQKLISEEDLDIQMTQTTSSLSASLGDRVT | pSTS071 |
| | ISCRASQDISKYLNWYQQKPDGTVKLLIYHTSRLHSGVPSRFSGSGSGTD | Human |
| | YSLTISNLEQEDIATYFCQQGNTLPYTFGGGTKLEITGGGGSGGGGSGGG | SynNotch1 |
| | GSEVKLQESGPGLVAPSQSLSVTCTVSGVSLPDYGVSWIRQPPRKGLEWL | with Nradd |
| | GVIWGSETTYYNSALKSRLTIIKDNSKSQVFLKMNSLQTDDTAIYYCAKH | STS |
| | YYYGGSYAMDYWGQGTSVTVSSILDYSFGGGAGRDIPPPLIEEACELPEC | |
| | QEDAGNKVCSLQCNNHACGWDGGDCSLNFNDPWKNCTQSLQCWKYFS | |
| | DGHCDSQCNSAGCLFDGFDCQRAEGQCNPLYDQYCKDHFSDGHCDQGC | |
| | NSAECEWDGLDCAEHVPERLAAGTLVVVVLMPPEQLRNSSFHFLRELSR | |
| | VLHTNVVFKRDAHGQQMIFPYYGREEELRKHPIKRAAEGWAAPDALLG | |
| | QVKASLLPGGSEGGRRRRELDPMDVRGSIVYLEIDNRQCVQASSQCFQSA | |
| | TDVAAFLGALASLGSLNIPYKIEAVQSETVEPPPPAQLHFMYVAAAAFVL | |
| | LFFVGCGVLLSKCWRSHKQRMKLLSSIEQACDICRLKKLKCSKEKPKCA | |
| | KCLKNNWECRYSPKTKRSPLTRAHLTEVESRLERLEQLFLLIFPREDLDMI | |
| | LKMDSLQDIKALLTGLFVQDNVNKDAVTDRLASVETDMPLTLRQHRISA | |
| | TSSSEESSNKGQRQLTVSAAAGGSGGSGGSDALDDFDLDMLGSDALDDF | |
| | DLDMLGSDALDDFDLDMLGSDALDDFDLDMLGS | |
| 72 | MALPVTALLLPLALLLHAARPEQKLISEEDLDIQMTQTTSSLSASLGDRVT | pSTS072 |
| | ISCRASQDISKYLNWYQQKPDGTVKLLIYHTSRLHSGVPSRFSGSGSGTD | Human |
| | YSLTISNLEQEDIATYFCQQGNTLPYTFGGGTKLEITGGGGSGGGGSGGG | SynNotch1 |
| | GSEVKLQESGPGLVAPSQSLSVTCTVSGVSLPDYGVSWIRQPPRKGLEWL | with PTPRM |
| | GVIWGSETTYYNSALKSRLTIIKDNSKSQVFLKMNSLQTDDTAIYYCAKH | STS |
| | YYYGGSYAMDYWGQGTSVTVSSILDYSFGGGAGRDIPPPLIEEACELPEC | |
| | QEDAGNKVCSLQCNNHACGWDGGDCSLNFNDPWKNCTQSLQCWKYFS | |
| | DGHCDSQCNSAGCLFDGFDCQRAEGQCNPLYDQYCKDHFSDGHCDQGC | |
| | NSAECEWDGLDCAEHVPERLAAGTLVVVVLMPPEQLRNSSFHFLRELSR | |
| | VLHTNVVFKRDAHGQQMIFPYYGREEELRKHPIKRAAEGWAAPDALLG | |
| | QVKASLLPGGSEGGRRRRELDPMDVRGSIVYLEIDNRQCVQASSQCFQSA | |
| | TDVAAFLGALASLGSLNIPYKIEAVQSETVEPPPPAQLHFMYVAAAAFVL | |
| | LFFVGCGVLLSKKRKLAKKRKMKLLSSIEQACDICRLKKLKCSKEKPKCA | |
| | KCLKNNWECRYSPKTKRSPLTRAHLTEVESRLERLEQLFLLIFPREDLDMI | |
| | LKMDSLQDIKALLTGLFVQDNVNKDAVTDRLASVETDMPLTLRQHRISA | |
| | TSSSEESSNKGQRQLTVSAAAGGSGGSGGSDALDDFDLDMLGSDALDDF | |
| | DLDMLGSDALDDFDLDMLGSDALDDFDLDMLGS | |
| 73 | MALPVTALLLPLALLLHAARPEQKLISEEDLDIQMTQTTSSLSASLGDRVT | pIZ618 |
| | ISCRASQDISKYLNWYQQKPDGTVKLLIYHTSRLHSGVPSRFSGSGSGTD | Human |
| | YSLTISNLEQEDIATYFCQQGNTLPYTFGGGTKLEITGGGGSGGGGSGGG | SynNotch1 |
| | GSEVKLQESGPGLVAPSQSLSVTCTVSGVSLPDYGVSWIRQPPRKGLEWL | with Notch2 |
| | GVIWGSETTYYNSALKSRLTIIKDNSKSQVFLKMNSLQTDDTAIYYCAKH | STS |
| | YYYGGSYAMDYWGQGTSVTVSSILDYSFGGGAGRDIPPPLIEEACELPEC | |
| | QEDAGNKVCSLQCNNHACGWDGGDCSLNFNDPWKNCTQSLQCWKYFS | |
| | DGHCDSQCNSAGCLFDGFDCQRAEGQCNPLYDQYCKDHFSDGHCDQGC | |
| | NSAECEWDGLDCAEHVPERLAAGTLVVVVLMPPEQLRNSSFHFLRELSR | |
| | VLHTNVVFKRDAHGQQMIFPYYGREEELRKHPIKRAAEGWAAPDALLG | |
| | QVKASLLPGGSEGGRRRRELDPMDVRGSIVYLEIDNRQCVQASSQCFQSA | |
| | TDVAAFLGALASLGSLNIPYKIEAVQSETVEPPPPAQLHFMYVAAAAFVL | |
| | LFFVGCGVLLSKRKRKHMKLLSSIEQACDICRLKKLKCSKEKPKCAKCLK | |
| | NNWECRYSPKTKRSPLTRAHLTEVESRLERLEQLFLLIFPREDLDMILKM | |
| | DSLQDIKALLTGLFVQDNVNKDAVTDRLASVETDMPLTLRQHRISATSSS | |
| | EESSNKGQRQLTVSAAAGGSGGSGGSDALDDFDLDMLGSDALDDFDLD | |
| | MLGSDALDDFDLDMLGSDALDDFDLDMLGS | |
| 74 | MALPVTALLLPLALLLHAARPEQKLISEEDLDIQMTQTTSSLSASLGDRVT | pIZ619 |
| | ISCRASQDISKYLNWYQQKPDGTVKLLIYHTSRLHSGVPSRFSGSGSGTD | Human |
| | YSLTISNLEQEDIATYFCQQGNTLPYTFGGGTKLEITGGGGSGGGGSGGG | SynNotch1 |
| | GSEVKLQESGPGLVAPSQSLSVTCTVSGVSLPDYGVSWIRQPPRKGLEWL | with Notch3 |
| | GVIWGSETTYYNSALKSRLTIIKDNSKSQVFLKMNSLQTDDTAIYYCAKH | STS |
| | YYYGGSYAMDYWGQGTSVTVSSILDYSFGGGAGRDIPPPLIEEACELPEC | |
| | QEDAGNKVCSLQCNNHACGWDGGDCSLNFNDPWKNCTQSLQCWKYFS | |
| | DGHCDSQCNSAGCLFDGFDCQRAEGQCNPLYDQYCKDHFSDGHCDQGC | |
| | NSAECEWDGLDCAEHVPERLAAGTLVVVVLMPPEQLRNSSFHFLRELSR | |
| | VLHTNVVFKRDAHGQQMIFPYYGREEELRKHPIKRAAEGWAAPDALLG | |
| | QVKASLLPGGSEGGRRRRELDPMDVRGSIVYLEIDNRQCVQASSQCFQSA | |
| | TDVAAFLGALASLGSLNIPYKIEAVQSETVEPPPPAQLHFMYVAAAAFVL | |
| | LFFVGCGVLLSRRKREHMKLLSSIEQACDICRLKKLKCSKEKPKCAKCLK | |
| | NNWECRYSPKTKRSPLTRAHLTEVESRLERLEQLFLLIFPREDLDMILKM | |
| | DSLQDIKALLTGLFVQDNVNKDAVTDRLASVETDMPLTLRQHRISATSSS | |
| | EESSNKGQRQLTVSAAAGGSGGSGGSDALDDFDLDMLGSDALDDFDLD | |
| | MLGSDALDDFDLDMLGSDALDDFDLDMLGS | |
| 75 | MALPVTALLLPLALLLHAARPEQKLISEEDLDIQMTQTTSSLSASLGDRVT | pIZ620 |
| | ISCRASQDISKYLNWYQQKPDGTVKLLIYHTSRLHSGVPSRFSGSGSGTD | Human |
| | YSLTISNLEQEDIATYFCQQGNTLPYTFGGGTKLEITGGGGSGGGGSGGG | SynNotch1 |
| | GSEVKLQESGPGLVAPSQSLSVTCTVSGVSLPDYGVSWIRQPPRKGLEWL | with Notch4 |
| | GVIWGSETTYYNSALKSRLTIIKDNSKSQVFLKMNSLQTDDTAIYYCAKH | STS |
| | YYYGGSYAMDYWGQGTSVTVSSILDYSFGGGAGRDIPPPLIEEACELPEC | |
| | QEDAGNKVCSLQCNNHACGWDGGDCSLNFNDPWKNCTQSLQCWKYFS | |
| | DGHCDSQCNSAGCLFDGFDCQRAEGQCNPLYDQYCKDHFSDGHCDQGC | |
| | NSAECEWDGLDCAEHVPERLAAGTLVVVVLMPPEQLRNSSFHFLRELSR | |
| | VLHTNVVFKRDAHGQQMIFPYYGREEELRKHPIKRAAEGWAAPDALLG | |
| | QVKASLLPGGSEGGRRRRELDPMDVRGSIVYLEIDNRQCVQASSQCFQSA | |
| | TDVAAFLGALASLGSLNIPYKIEAVQSETVEPPPPAQLHFMYVAAAAFVL | |
| | LFFVGCGVLLSRRRRREHMKLLSSIEQACDICRLKKLKCSKEKPKCAKCL | |
| | KNNWECRYSPKTKRSPLTRAHLTEVESRLERLEQLFLLIFPREDLDMILK | |
| | MDSLQDIKALLTGLFVQDNVNKDAVTDRLASVETDMPLTLRQHRISATS | |
| | SSEESSNKGQRQLTVSAAAGGSGGSGGSDALDDFDLDMLGSDALDDFDL | |
| | DMLGSDALDDFDLDMLGSDALDDFDLDMLGS | |
| 76 | MALPVTALLLPLALLLHAARPEQKLISEEDLDIQMTQTTSSLSASLGDRVT | pSTS106 |
| | ISCRASQDISKYLNWYQQKPDGTVKLLIYHTSRLHSGVPSRFSGSGSGTD | miniNotch |
| | YSLTISNLEQEDIATYFCQQGNTLPYTFGGGTKLEITGGGGSGGGGSGGG | with CXCL16 |
| | GSEVKLQESGPGLVAPSQSLSVTCTVSGVSLPDYGVSWIRQPPRKGLEWL | STS |
| | GVIWGSETTYYNSALKSRLTIIKDNSKSQVFLKMNSLQTDDTAIYYCAKH | |
| | YYYGGSYAMDYWGQGTSVTVSSILDYSFGGGAGRDIPPPLIEETVEPPPP | |
| | AQLHFMYVAAAAFVLLFFVGCGVLLSKRRRMKLLSSIEQACDICRLKKL | |
| | KCSKEKPKCAKCLKNNWECRYSPKTKRSPLTRAHLTEVESRLERLEQLFL | |
| | LIFPREDLDMILKMDSLQDIKALLTGLFVQDNVNKDAVTDRLASVETDM | |
| | PLTLRQHRISATSSSEESSNKGQRQLTVSAAAGGSGGSGGSDALDDFDLD | |
| | MLGSDALDDFDLDMLGSDALDDFDLDMLGSDALDDFDLDMLGS | |
| 77 | MALPVTALLLPLALLLHAARPEQKLISEEDLDIQMTQTTSSLSASLGDRVT | pSTS108 |
| | ISCRASQDISKYLNWYQQKPDGTVKLLIYHTSRLHSGVPSRFSGSGSGTD | miniNotch |
| | YSLTISNLEQEDIATYFCQQGNTLPYTFGGGTKLEITGGGGSGGGGSGGG | with STS#8 |
| | GSEVKLQESGPGLVAPSQSLSVTCTVSGVSLPDYGVSWIRQPPRKGLEWL | |
| | GVIWGSETTYYNSALKSRLTIIKDNSKSQVFLKMNSLQTDDTAIYYCAKH | |
| | YYYGGSYAMDYWGQGTSVTVSSILDYSFGGGAGRDIPPPLIEETVEPPPP | |
| | AQLHFMYVAAAAFVLLFFVGCGVLLSRKKRKGKMKLLSSIEQACDICRL | |
| | KKLKCSKEKPKCAKCLKNNWECRYSPKTKRSPLTRAHLTEVESRLERLE | |
| | QLFLLIFPREDLDMILKMDSLQDIKALLTGLFVQDNVNKDAVTDRLASVE | |
| | TDMPLTLRQHRISATSSSEESSNKGQRQLTVSAAAGGSGGSGGSDALDDF | |
| | DLDMLGSDALDDFDLDMLGSDALDDFDLDMLGSDALDDFDLDMLGS | |
| 78 | MALPVTALLLPLALLLHAARPEQKLISEEDLDIQMTQTTSSLSASLGDRVT | pSTS113 |
| | ISCRASQDISKYLNWYQQKPDGTVKLLIYHTSRLHSGVPSRFSGSGSGTD | miniNotch |
| | YSLTISNLEQEDIATYFCQQGNTLPYTFGGGTKLEITGGGGSGGGGSGGG | with STS# 13 |
| | GSEVKLQESGPGLVAPSQSLSVTCTVSGVSLPDYGVSWIRQPPRKGLEWL | |
| | GVIWGSETTYYNSALKSRLTIIKDNSKSQVFLKMNSLQTDDTAIYYCAKH | |
| | YYYGGSYAMDYWGQGTSVTVSSILDYSFGGGAGRDIPPPLIEETVEPPPP | |
| | AQLHFMYVAAAAFVLLFFVGCGVLLSKQQRIKMKLLSSIEQACDICRLK | |
| | KLKCSKEKPKCAKCLKNNWECRYSPKTKRSPLTRAHLTEVESRLERLEQ | |
| | LFLLIFPREDLDMILKMDSLQDIKALLTGLFVQDNVNKDAVTDRLASVET | |
| | DMPLTLRQHRISATSSSEESSNKGQRQLTVSAAAGGSGGSGGSDALDDFD | |
| | LDMLGSDALDDFDLDMLGSDALDDFDLDMLGSDALDDFDLDMLGS | |
| 79 | MALPVTALLLPLALLLHAARPEQKLISEEDLDIQMTQTTSSLSASLGDRVT | pSTS124 |
| | ISCRASQDISKYLNWYQQKPDGTVKLLIYHTSRLHSGVPSRFSGSGSGTD | miniNotch |
| | YSLTISNLEQEDIATYFCQQGNTLPYTFGGGTKLEITGGGGSGGGGSGGG | with STS#24 |
| | GSEVKLQESGPGLVAPSQSLSVTCTVSGVSLPDYGVSWIRQPPRKGLEWL | |
| | GVIWGSETTYYNSALKSRLTIIKDNSKSQVFLKMNSLQTDDTAIYYCAKH | |
| | YYYGGSYAMDYWGQGTSVTVSSILDYSFGGGAGRDIPPPLIEETVEPPPP | |
| | AQLHFMYVAAAAFVLLFFVGCGVLLSKRKRTHMKLLSSIEQACDICRLK | |
| | KLKCSKEKPKCAKCLKNNWECRYSPKTKRSPLTRAHLTEVESRLERLEQ | |
| | LFLLIFPREDLDMILKMDSLQDIKALLTGLFVQDNVNKDAVTDRLASVET | |
| | DMPLTLRQHRISATSSSEESSNKGQRQLTVSAAAGGSGGSGGSDALDDFD | |
| | LDMLGSDALDDFDLDMLGSDALDDFDLDMLGSDALDDFDLDMLGS | |
| 80 | MALPVTALLLPLALLLHAARPEQKLISEEDLDIQMTQTTSSLSASLGDRVT | pSTS147 |
| | ISCRASQDISKYLNWYQQKPDGTVKLLIYHTSRLHSGVPSRFSGSGSGTD | miniNotch |
| | YSLTISNLEQEDIATYFCQQGNTLPYTFGGGTKLEITGGGGSGGGGSGGG | with STS#47 |
| | GSEVKLQESGPGLVAPSQSLSVTCTVSGVSLPDYGVSWIRQPPRKGLEWL | |
| | GVIWGSETTYYNSALKSRLTIIKDNSKSQVFLKMNSLQTDDTAIYYCAKH | |
| | YYYGGSYAMDYWGQGTSVTVSSILDYSFGGGAGRDIPPPLIEETVEPPPP | |
| | AQLHFMYVAAAAFVLLFFVGCGVLLSKKGRRSYKMKLLSSIEQACDICR | |
| | LKKLKCSKEKPKCAKCLKNNWECRYSPKTKRSPLTRAHLTEVESRLERL | |
| | EQLFLLIFPREDLDMILKMDSLQDIKALLTGLFVQDNVNKDAVTDRLASV | |
| | ETDMPLTLRQHRISATSSSEESSNKGQRQLTVSAAAGGSGGSGGSDALDD | |
| | FDLDMLGSDALDDFDLDMLGSDALDDFDLDMLGSDALDDFDLDMLGS | |
| 81 | MALPVTALLLPLALLLHAARPEQKLISEEDLDIQMTQTTSSLSASLGDRVT | pSTS154 |
| | ISCRASQDISKYLNWYQQKPDGTVKLLIYHTSRLHSGVPSRFSGSGSGTD | miniNotch |
| | YSLTISNLEQEDIATYFCQQGNTLPYTFGGGTKLEITGGGGSGGGGSGGG | with STS#54 |
| | GSEVKLQESGPGLVAPSQSLSVTCTVSGVSLPDYGVSWIRQPPRKGLEWL | |
| | GVIWGSETTYYNSALKSRLTIIKDNSKSQVFLKMNSLQTDDTAIYYCAKH | |
| | YYYGGSYAMDYWGQGTSVTVSSILDYSFGGGAGRDIPPPLIEETVEPPPP | |
| | AQLHFMYVAAAAFVLLFFVGCGVLLSKTKKQRKKLHDRLRMKLLSSIEQ | |
| | ACDICRLKKLKCSKEKPKCAKCLKNNWECRYSPKTKRSPLTRAHLTEVE | |
| | SRLERLEQLFLLIFPREDLDMILKMDSLQDIKALLTGLFVQDNVNKDAVT | |
| | DRLASVETDMPLTLRQHRISATSSSEESSNKGQRQLTVSAAAGGSGGSGG | |
| | SDALDDFDLDMLGSDALDDFDLDMLGSDALDDFDLDMLGSDALDDFDL | |
| | DMLGS | |
| 82 | MALPVTALLLPLALLLHAARPEQKLISEEDLDIQMTQTTSSLSASLGDRVT | pSTS155 |
| | ISCRASQDISKYLNWYQQKPDGTVKLLIYHTSRLHSGVPSRFSGSGSGTD | miniNotch |
| | YSLTISNLEQEDIATYFCQQGNTLPYTFGGGTKLEITGGGGSGGGGSGGG | with STS#55 |
| | GSEVKLQESGPGLVAPSQSLSVTCTVSGVSLPDYGVSWIRQPPRKGLEWL | |
| | GVIWGSETTYYNSALKSRLTIIKDNSKSQVFLKMNSLQTDDTAIYYCAKH | |
| | YYYGGSYAMDYWGQGTSVTVSSILDYSFGGGAGRDIPPPLIEETVEPPPP | |
| | AQLHFMYVAAAAFVLLFFVGCGVLLSKRKRRTKTIRRMKLLSSIEQACDI | |
| | CRLKKLKCSKEKPKCAKCLKNNWECRYSPKTKRSPLTRAHLTEVESRLE | |
| | RLEQLFLLIFPREDLDMILKMDSLQDIKALLTGLFVQDNVNKDAVTDRLA | |
| | SVETDMPLTLRQHRISATSSSEESSNKGQRQLTVSAAAGGSGGSGGSDAL | |
| | DDFDLDMLGSDALDDFDLDMLGSDALDDFDLDMLGSDALDDFDLDML | |
| | GS | |
| 83 | MALPVTALLLPLALLLHAARPEQKLISEEDLDIQMTQTTSSLSASLGDRVT | pSTS156 |
| | ISCRASQDISKYLNWYQQKPDGTVKLLIYHTSRLHSGVPSRFSGSGSGTD | miniNotch |
| | YSLTISNLEQEDIATYFCQQGNTLPYTFGGGTKLEITGGGGSGGGGSGGG | with STS#56 |
| | GSEVKLQESGPGLVAPSQSLSVTCTVSGVSLPDYGVSWIRQPPRKGLEWL | |
| | GVIWGSETTYYNSALKSRLTIIKDNSKSQVFLKMNSLQTDDTAIYYCAKH | |
| | YYYGGSYAMDYWGQGTSVTVSSILDYSFGGGAGRDIPPPLIEETVEPPPP | |
| | AQLHFMYVAAAAFVLLFFVGCGVLLSRKRRKERERSRLPRMKLLSSIEQ | |
| | ACDICRLKKLKCSKEKPKCAKCLKNNWECRYSPKTKRSPLTRAHLTEVE | |
| | SRLERLEQLFLLIFPREDLDMILKMDSLQDIKALLTGLFVQDNVNKDAVT | |
| | DRLASVETDMPLTLRQHRISATSSSEESSNKGQRQLTVSAAAGGSGGSGG | |
| | SDALDDFDLDMLGSDALDDFDLDMLGSDALDDFDLDMLGSDALDDFDL | |
| | DMLGS | |
| 84 | MALPVTALLLPLALLLHAARPEQKLISEEDLDIQMTQTTSSLSASLGDRVT | pSTS160 |
| | ISCRASQDISKYLNWYQQKPDGTVKLLIYHTSRLHSGVPSRFSGSGSGTD | miniNotch |
| | YSLTISNLEQEDIATYFCQQGNTLPYTFGGGTKLEITGGGGSGGGGSGGG | with STS#60 |
| | GSEVKLQESGPGLVAPSQSLSVTCTVSGVSLPDYGVSWIRQPPRKGLEWL | |
| | GVIWGSETTYYNSALKSRLTIIKDNSKSQVFLKMNSLQTDDTAIYYCAKH | |
| | YYYGGSYAMDYWGQGTSVTVSSILDYSFGGGAGRDIPPPLIEETVEPPPP | |
| | AQLHFMYVAAAAFVLLFFVGCGVLLSRKKRMAKYEKMKLLSSIEQACDI | |
| | CRLKKLKCSKEKPKCAKCLKNNWECRYSPKTKRSPLTRAHLTEVESRLE | |
| | RLEQLFLLIFPREDLDMILKMDSLQDIKALLTGLFVQDNVNKDAVTDRLA | |
| | SVETDMPLTLRQHRISATSSSEESSNKGQRQLTVSAAAGGSGGSGGSDAL | |
| | DDFDLDMLGSDALDDFDLDMLGSDALDDFDLDMLGSDALDDFDLDML | |
| | GS | |
| 85 | MALPVTALLLPLALLLHAARPEQKLISEEDLDIQMTQTTSSLSASLGDRVT | pSTS164 |
| | ISCRASQDISKYLNWYQQKPDGTVKLLIYHTSRLHSGVPSRFSGSGSGTD | miniNotch |
| | YSLTISNLEQEDIATYFCQQGNTLPYTFGGGTKLEITGGGGSGGGGSGGG | with STS#64 |
| | GSEVKLQESGPGLVAPSQSLSVTCTVSGVSLPDYGVSWIRQPPRKGLEWL | |
| | GVIWGSETTYYNSALKSRLTIIKDNSKSQVFLKMNSLQTDDTAIYYCAKH | |
| | YYYGGSYAMDYWGQGTSVTVSSILDYSFGGGAGRDIPPPLIEETVEPPPP | |
| | AQLHFMYVAAAAFVLLFFVGCGVLLSKTKKQRKQMHNHLRMKLLSSIE | |
| | QACDICRLKKLKCSKEKPKCAKCLKNNWECRYSPKTKRSPLTRAHLTEV | |
| | ESRLERLEQLFLLIFPREDLDMILKMDSLQDIKALLTGLFVQDNVNKDAV | |
| | TDRLASVETDMPLTLRQHRISATSSSEESSNKGQRQLTVSAAAGGSGGSG | |
| | GSDALDDFDLDMLGSDALDDFDLDMLGSDALDDFDLDMLGSDALDDFD | |
| | LDMLGS | |
| 86 | MALPVTALLLPLALLLHAARPEQKLISEEDLDIQMTQTTSSLSASLGDRVT | pSTS165 |
| | ISCRASQDISKYLNWYQQKPDGTVKLLIYHTSRLHSGVPSRFSGSGSGTD | miniNotch |
| | YSLTISNLEQEDIATYFCQQGNTLPYTFGGGTKLEITGGGGSGGGGSGGG | with STS#65 |
| | GSEVKLQESGPGLVAPSQSLSVTCTVSGVSLPDYGVSWIRQPPRKGLEWL | |
| | GVIWGSETTYYNSALKSRLTIIKDNSKSQVFLKMNSLQTDDTAIYYCAKH | |
| | YYYGGSYAMDYWGQGTSVTVSSILDYSFGGGAGRDIPPPLIEETVEPPPP | |
| | AQLHFMYVAAAAFVLLFFVGCGVLLSKKSKLAKKRKMKLLSSIEQACDI | |
| | CRLKKLKCSKEKPKCAKCLKNNWECRYSPKTKRSPLTRAHLTEVESRLE | |
| | RLEQLFLLIFPREDLDMILKMDSLQDIKALLTGLFVQDNVNKDAVTDRLA | |
| | SVETDMPLTLRQHRISATSSSEESSNKGQRQLTVSAAAGGSGGSGGSDAL | |
| | DDFDLDMLGSDALDDFDLDMLGSDALDDFDLDMLGSDALDDFDLDML | |
| | GS | |
| 87 | MALPVTALLLPLALLLHAARPEQKLISEEDLDIQMTQTTSSLSASLGDRVT | pSTS172 |
| | ISCRASQDISKYLNWYQQKPDGTVKLLIYHTSRLHSGVPSRFSGSGSGTD | miniNotch |
| | YSLTISNLEQEDIATYFCQQGNTLPYTFGGGTKLEITGGGGSGGGGSGGG | with STS#72 |
| | GSEVKLQESGPGLVAPSQSLSVTCTVSGVSLPDYGVSWIRQPPRKGLEWL | |
| | GVIWGSETTYYNSALKSRLTIIKDNSKSQVFLKMNSLQTDDTAIYYCAKH | |
| | YYYGGSYAMDYWGQGTSVTVSSILDYSFGGGAGRDIPPPLIEETVEPPPP | |
| | AQLHFMYVAAAAFVLLFFVGCGVLLSKKRKLAKKRKMKLLSSIEQACDI | |
| | CRLKKLKCSKEKPKCAKCLKNNWECRYSPKTKRSPLTRAHLTEVESRLE | |
| | RLEQLFLLIFPREDLDMILKMDSLQDIKALLTGLFVQDNVNKDAVTDRLA | |
| | SVETDMPLTLRQHRISATSSSEESSNKGQRQLTVSAAAGGSGGSGGSDAL | |
| | DDFDLDMLGSDALDDFDLDMLGSDALDDFDLDMLGSDALDDFDLDML | |
| | GS | |
| 88 | MALPVTALLLPLALLLHAARPEQKLISEEDLDIQMTQTTSSLSASLGDRVT | pSTS206 |
| | ISCRASQDISKYLNWYQQKPDGTVKLLIYHTSRLHSGVPSRFSGSGSGTD | HingeNotch |
| | YSLTISNLEQEDIATYFCQQGNTLPYTFGGGTKLEITGGGGSGGGGSGGG | with STS#6 |
| | GSEVKLQESGPGLVAPSQSLSVTCTVSGVSLPDYGVSWIRQPPRKGLEWL | |
| | GVIWGSETTYYNSALKSRLTIIKDNSKSQVFLKMNSLQTDDTAIYYCAKH | |
| | YYYGGSYAMDYWGQGTSVTVSSTTTPAPRPPTPAPTIASQPLSLRPEACF | |
| | MYVAAAAFVLLFFVGCGVLLSKRRRMKLLSSIEQACDICRLKKLKCSKE | |
| | KPKCAKCLKNNWECRYSPKTKRSPLTRAHLTEVESRLERLEQLFLLIFPRE | |
| | DLDMILKMDSLQDIKALLTGLFVQDNVNKDAVTDRLASVETDMPLTLRQ | |
| | HRISATSSSEESSNKGQRQLTVSAAAGGSGGSGGSDALDDFDLDMLGSD | |
| | ALDDFDLDMLGSDALDDFDLDMLGSDALDDFDLDMLGS | |
| 89 | MALPVTALLLPLALLLHAARPEQKLISEEDLDIQMTQTTSSLSASLGDRVT | pSTS208 |
| | ISCRASQDISKYLNWYQQKPDGTVKLLIYHTSRLHSGVPSRFSGSGSGTD | HingeNotch |
| | YSLTISNLEQEDIATYFCQQGNTLPYTFGGGTKLEITGGGGSGGGGSGGG | with STS#8 |
| | GSEVKLQESGPGLVAPSQSLSVTCTVSGVSLPDYGVSWIRQPPRKGLEWL | |
| | GVIWGSETTYYNSALKSRLTIIKDNSKSQVFLKMNSLQTDDTAIYYCAKH | |
| | YYYGGSYAMDYWGQGTSVTVSSTTTPAPRPPTPAPTIASQPLSLRPEACF | |
| | MYVAAAAFVLLFFVGCGVLLSRKKRKGKMKLLSSIEQACDICRLKKLKC | |
| | SKEKPKCAKCLKNNWECRYSPKTKRSPLTRAHLTEVESRLERLEQLFLLI | |
| | FPREDLDMILKMDSLQDIKALLTGLFVQDNVNKDAVTDRLASVETDMPL | |
| | TLRQHRISATSSSEESSNKGQRQLTVSAAAGGSGGSGGSDALDDFDLDML | |
| | GSDALDDFDLDMLGSDALDDFDLDMLGSDALDDFDLDMLGS | |
| 90 | MALPVTALLLPLALLLHAARPEQKLISEEDLDIQMTQTTSSLSASLGDRVT | pSTS213 |
| | ISCRASQDISKYLNWYQQKPDGTVKLLIYHTSRLHSGVPSRFSGSGSGTD | HingeNotch |
| | YSLTISNLEQEDIATYFCQQGNTLPYTFGGGTKLEITGGGGSGGGGSGGG | with STS# 13 |
| | GSEVKLQESGPGLVAPSQSLSVTCTVSGVSLPDYGVSWIRQPPRKGLEWL | |
| | GVIWGSETTYYNSALKSRLTIIKDNSKSQVFLKMNSLQTDDTAIYYCAKH | |
| | YYYGGSYAMDYWGQGTSVTVSSTTTPAPRPPTPAPTIASQPLSLRPEACF | |
| | MYVAAAAFVLLFFVGCGVLLSKQQRIKMKLLSSIEQACDICRLKKLKCSK | |
| | EKPKCAKCLKNNWECRYSPKTKRSPLTRAHLTEVESRLERLEQLFLLIFPR | |
| | EDLDMILKMDSLQDIKALLTGLFVQDNVNKDAVTDRLASVETDMPLTLR | |
| | QHRISATSSSEESSNKGQRQLTVSAAAGGSGGSGGSDALDDFDLDMLGS | |
| | DALDDFDLDMLGSDALDDFDLDMLGSDALDDFDLDMLGS | |
| 91 | MALPVTALLLPLALLLHAARPEQKLISEEDLDIQMTQTTSSLSASLGDRVT | pSTS224 |
| | ISCRASQDISKYLNWYQQKPDGTVKLLIYHTSRLHSGVPSRFSGSGSGTD | HingeNotch |
| | YSLTISNLEQEDIATYFCQQGNTLPYTFGGGTKLEITGGGGSGGGGSGGG | with STS#24 |
| | GSEVKLQESGPGLVAPSQSLSVTCTVSGVSLPDYGVSWIRQPPRKGLEWL | |
| | GVIWGSETTYYNSALKSRLTIIKDNSKSQVFLKMNSLQTDDTAIYYCAKH | |
| | YYYGGSYAMDYWGQGTSVTVSSTTTPAPRPPTPAPTIASQPLSLRPEACF | |
| | MYVAAAAFVLLFFVGCGVLLSKRKRTHMKLLSSIEQACDICRLKKLKCS | |
| | KEKPKCAKCLKNNWECRYSPKTKRSPLTRAHLTEVESRLERLEQLFLLIF | |
| | PREDLDMILKMDSLQDIKALLTGLFVQDNVNKDAVTDRLASVETDMPLT | |
| | LRQHRISATSSSEESSNKGQRQLTVSAAAGGSGGSGGSDALDDFDLDML | |
| | GSDALDDFDLDMLGSDALDDFDLDMLGSDALDDFDLDMLGS | |
| 92 | MALPVTALLLPLALLLHAARPEQKLISEEDLDIQMTQTTSSLSASLGDRVT | pSTS247 |
| | ISCRASQDISKYLNWYQQKPDGTVKLLIYHTSRLHSGVPSRFSGSGSGTD | HingeNotch |
| | YSLTISNLEQEDIATYFCQQGNTLPYTFGGGTKLEITGGGGSGGGGSGGG | with STS#47 |
| | GSEVKLQESGPGLVAPSQSLSVTCTVSGVSLPDYGVSWIRQPPRKGLEWL | |
| | GVIWGSETTYYNSALKSRLTIIKDNSKSQVFLKMNSLQTDDTAIYYCAKH | |
| | YYYGGSYAMDYWGQGTSVTVSSTTTPAPRPPTPAPTIASQPLSLRPEACF | |
| | MYVAAAAFVLLFFVGCGVLLSKKGRRSYKMKLLSSIEQACDICRLKKLK | |
| | CSKEKPKCAKCLKNNWECRYSPKTKRSPLTRAHLTEVESRLERLEQLFLL | |
| | IFPREDLDMILKMDSLQDIKALLTGLFVQDNVNKDAVTDRLASVETDMP | |
| | LTLRQHRISATSSSEESSNKGQRQLTVSAAAGGSGGSGGSDALDDFDLDM | |
| | LGSDALDDFDLDMLGSDALDDFDLDMLGSDALDDFDLDMLGS | |
| 93 | MALPVTALLLPLALLLHAARPEQKLISEEDLDIQMTQTTSSLSASLGDRVT | pSTS254 |
| | ISCRASQDISKYLNWYQQKPDGTVKLLIYHTSRLHSGVPSRFSGSGSGTD | HingeNotch |
| | YSLTISNLEQEDIATYFCQQGNTLPYTFGGGTKLEITGGGGSGGGGSGGG | with STS#54 |
| | GSEVKLQESGPGLVAPSQSLSVTCTVSGVSLPDYGVSWIRQPPRKGLEWL | |
| | GVIWGSETTYYNSALKSRLTIIKDNSKSQVFLKMNSLQTDDTAIYYCAKH | |
| | YYYGGSYAMDYWGQGTSVTVSSTTTPAPRPPTPAPTIASQPLSLRPEACF | |
| | MYVAAAAFVLLFFVGCGVLLSKTKKQRKKLHDRLRMKLLSSIEQACDIC | |
| | RLKKLKCSKEKPKCAKCLKNNWECRYSPKTKRSPLTRAHLTEVESRLER | |
| | LEQLFLLIFPREDLDMILKMDSLQDIKALLTGLFVQDNVNKDAVTDRLAS | |
| | VETDMPLTLRQHRISATSSSEESSNKGQRQLTVSAAAGGSGGSGGSDALD | |
| | DFDLDMLGSDALDDFDLDMLGSDALDDFDLDMLGSDALDDFDLDMLGS | |
| 94 | MALPVTALLLPLALLLHAARPEQKLISEEDLDIQMTQTTSSLSASLGDRVT | pSTS255 |
| | ISCRASQDISKYLNWYQQKPDGTVKLLIYHTSRLHSGVPSRFSGSGSGTD | HingeNotch |
| | YSLTISNLEQEDIATYFCQQGNTLPYTFGGGTKLEITGGGGSGGGGSGGG | with STS#55 |
| | GSEVKLQESGPGLVAPSQSLSVTCTVSGVSLPDYGVSWIRQPPRKGLEWL | |
| | GVIWGSETTYYNSALKSRLTIIKDNSKSQVFLKMNSLQTDDTAIYYCAKH | |
| | YYYGGSYAMDYWGQGTSVTVSSTTTPAPRPPTPAPTIASQPLSLRPEACF | |
| | MYVAAAAFVLLFFVGCGVLLSKRKRRTKTIRRMKLLSSIEQACDICRLKK | |
| | LKCSKEKPKCAKCLKNNWECRYSPKTKRSPLTRAHLTEVESRLERLEQLF | |
| | LLIFPREDLDMILKMDSLQDIKALLTGLFVQDNVNKDAVTDRLASVETD | |
| | MPLTLRQHRISATSSSEESSNKGQRQLTVSAAAGGSGGSGGSDALDDFDL | |
| | DMLGSDALDDFDLDMLGSDALDDFDLDMLGSDALDDFDLDMLGS | |
| 95 | MALPVTALLLPLALLLHAARPEQKLISEEDLDIQMTQTTSSLSASLGDRVT | pSTS256 |
| | ISCRASQDISKYLNWYQQKPDGTVKLLIYHTSRLHSGVPSRFSGSGSGTD | HingeNotch |
| | YSLTISNLEQEDIATYFCQQGNTLPYTFGGGTKLEITGGGGSGGGGSGGG | with STS#56 |
| | GSEVKLQESGPGLVAPSQSLSVTCTVSGVSLPDYGVSWIRQPPRKGLEWL | |
| | GVIWGSETTYYNSALKSRLTIIKDNSKSQVFLKMNSLQTDDTAIYYCAKH | |
| | YYYGGSYAMDYWGQGTSVTVSSTTTPAPRPPTPAPTIASQPLSLRPEACF | |
| | MYVAAAAFVLLFFVGCGVLLSRKRRKERERSRLPRMKLLSSIEQACDICR | |
| | LKKLKCSKEKPKCAKCLKNNWECRYSPKTKRSPLTRAHLTEVESRLERL | |
| | EQLFLLIFPREDLDMILKMDSLQDIKALLTGLFVQDNVNKDAVTDRLASV | |
| | ETDMPLTLRQHRISATSSSEESSNKGQRQLTVSAAAGGSGGSGGSDALDD | |
| | FDLDMLGSDALDDFDLDMLGSDALDDFDLDMLGSDALDDFDLDMLGS | |
| 96 | MALPVTALLLPLALLLHAARPEQKLISEEDLDIQMTQTTSSLSASLGDRVT | pSTS260 |
| | ISCRASQDISKYLNWYQQKPDGTVKLLIYHTSRLHSGVPSRFSGSGSGTD | HingeNotch |
| | YSLTISNLEQEDIATYFCQQGNTLPYTFGGGTKLEITGGGGSGGGGSGGG | with STS#60 |
| | GSEVKLQESGPGLVAPSQSLSVTCTVSGVSLPDYGVSWIRQPPRKGLEWL | |
| | GVIWGSETTYYNSALKSRLTIIKDNSKSQVFLKMNSLQTDDTAIYYCAKH | |
| | YYYGGSYAMDYWGQGTSVTVSSTTTPAPRPPTPAPTIASQPLSLRPEACF | |
| | MYVAAAAFVLLFFVGCGVLLSRKKRMAKYEKMKLLSSIEQACDICRLKK | |
| | LKCSKEKPKCAKCLKNNWECRYSPKTKRSPLTRAHLTEVESRLERLEQLF | |
| | LLIFPREDLDMILKMDSLQDIKALLTGLFVQDNVNKDAVTDRLASVETD | |
| | MPLTLRQHRISATSSSEESSNKGQRQLTVSAAAGGSGGSGGSDALDDFDL | |
| | DMLGSDALDDFDLDMLGSDALDDFDLDMLGSDALDDFDLDMLGS | |
| 97 | MALPVTALLLPLALLLHAARPEQKLISEEDLDIQMTQTTSSLSASLGDRVT | pSTS264 |
| | ISCRASQDISKYLNWYQQKPDGTVKLLIYHTSRLHSGVPSRFSGSGSGTD | HingeNotch |
| | YSLTISNLEQEDIATYFCQQGNTLPYTFGGGTKLEITGGGGSGGGGSGGG | with STS#64 |
| | GSEVKLQESGPGLVAPSQSLSVTCTVSGVSLPDYGVSWIRQPPRKGLEWL | |
| | GVIWGSETTYYNSALKSRLTIIKDNSKSQVFLKMNSLQTDDTAIYYCAKH | |
| | YYYGGSYAMDYWGQGTSVTVSSTTTPAPRPPTPAPTIASQPLSLRPEACF | |
| | MYVAAAAFVLLFFVGCGVLLSKTKKQRKQMHNHLRMKLLSSIEQACDI | |
| | CRLKKLKCSKEKPKCAKCLKNNWECRYSPKTKRSPLTRAHLTEVESRLE | |
| | RLEQLFLLIFPREDLDMILKMDSLQDIKALLTGLFVQDNVNKDAVTDRLA | |
| | SVETDMPLTLRQHRISATSSSEESSNKGQRQLTVSAAAGGSGGSGGSDAL | |
| | DDFDLDMLGSDALDDFDLDMLGSDALDDFDLDMLGSDALDDFDLDML | |
| | GS | |
| 98 | MALPVTALLLPLALLLHAARPEQKLISEEDLDIQMTQTTSSLSASLGDRVT | pSTS265 |
| | ISCRASQDISKYLNWYQQKPDGTVKLLIYHTSRLHSGVPSRFSGSGSGTD | HingeNotch |
| | YSLTISNLEQEDIATYFCQQGNTLPYTFGGGTKLEITGGGGSGGGGSGGG | with STS#65 |
| | GSEVKLQESGPGLVAPSQSLSVTCTVSGVSLPDYGVSWIRQPPRKGLEWL | |
| | GVIWGSETTYYNSALKSRLTIIKDNSKSQVFLKMNSLQTDDTAIYYCAKH | |
| | YYYGGSYAMDYWGQGTSVTVSSTTTPAPRPPTPAPTIASQPLSLRPEACF | |
| | MYVAAAAFVLLFFVGCGVLLSKKSKLAKKRKMKLLSSIEQACDICRLKK | |
| | LKCSKEKPKCAKCLKNNWECRYSPKTKRSPLTRAHLTEVESRLERLEQLF | |
| | LLIFPREDLDMILKMDSLQDIKALLTGLFVQDNVNKDAVTDRLASVETD | |
| | MPLTLRQHRISATSSSEESSNKGQRQLTVSAAAGGSGGSGGSDALDDFDL | |
| | DMLGSDALDDFDLDMLGSDALDDFDLDMLGSDALDDFDLDMLGS | |
| 99 | MALPVTALLLPLALLLHAARPEQKLISEEDLDIQMTQTTSSLSASLGDRVT | pSTS272 |
| | ISCRASQDISKYLNWYQQKPDGTVKLLIYHTSRLHSGVPSRFSGSGSGTD | HingeNotch |
| | YSLTISNLEQEDIATYFCQQGNTLPYTFGGGTKLEITGGGGSGGGGSGGG | with STS#72 |
| | GSEVKLQESGPGLVAPSQSLSVTCTVSGVSLPDYGVSWIRQPPRKGLEWL | |
| | GVIWGSETTYYNSALKSRLTIIKDNSKSQVFLKMNSLQTDDTAIYYCAKH | |
| | YYYGGSYAMDYWGQGTSVTVSSTTTPAPRPPTPAPTIASQPLSLRPEACF | |
| | MYVAAAAFVLLFFVGCGVLLSKKRKLAKKRKMKLLSSIEQACDICRLKK | |
| | LKCSKEKPKCAKCLKNNWECRYSPKTKRSPLTRAHLTEVESRLERLEQLF | |
| | LLIFPREDLDMILKMDSLQDIKALLTGLFVQDNVNKDAVTDRLASVETD | |
| | MPLTLRQHRISATSSSEESSNKGQRQLTVSAAAGGSGGSGGSDALDDFDL | |
| | DMLGSDALDDFDLDMLGSDALDDFDLDMLGSDALDDFDLDMLGS | |
| 100 | RRKK | APLP1 STS |
| 101 | RKR | APLP2 STS |
| 102 | KKK | APP STS |
| 103 | H | TGBR3 STS |
| 104 | KYKQKPK | CSF1R STS |
| 105 | KRRR | CXCL16 STS |
| 106 | RK | CX3CL1 STS |
| 107 | RKKRKGK | DAGI STS |
| 108 | RR | DCC STS |
| 109 | RISR | DNER STS |
| 110 | KCGKGAK | DSG2 STS |
| 111 | RRR | CDH1 STS |
| 112 | KQQRIK | GHR STS |
| 113 | RRK | HLA-A STS |
| 114 | K | IFNAR2 STS |
| 115 | HRKR | IGF1R STS |
| 116 | KIFK | IL1R1 STS |
| 117 | R | ERN2 STS |
| 118 | RSKKLEH | KCNE1 STS |
| 119 | KSKRREH | KCNE2 STS |
| 120 | KRNRGGK | CHL1 STS |
| 121 | KRR | LRP1 STS |
| 122 | HYRR | LRP2 STS |
| 123 | KRKRTH | PTPRF STS |
| 124 | KK | SCN1B STS |
| 125 | RKVSK | SCN3B STS |
| 126 | RKKYR | NPR3 STS |
| 127 | KR | NGFR STS |
| 128 | HH | PLXDC2 STS |
| 129 | RWKKSR | PAM STS |
| 130 | RRQRR | AGER STS |
| 131 | RHRKKR | ROBO1 STS |
| 132 | KRK | SORCS3 STS |
| 133 | KFKRR | SORCS1 STS |
| 134 | KHRR | SORL1 STS |
| 135 | RMKKK | SDC1 STS |
| 136 | RMRKK | SDC2 STS |
| 137 | RRRQKRR | SPN STS |
| 138 | RHKRK | TYR STS |
| 139 | RARR | TYRP1 STS |
| 140 | RRLRK | DCT STS |
| 141 | RRGR | VASN STS |
| 142 | RKMKR | FLT1 STS |
| 143 | RRRLRKQARAHGK | CDH5 STS |
| 144 | KRSKSRKTK | PKHD1 STS |
| 145 | RRRRHTFK | NECTIN1 STS |
| 146 | KKGRRSYK | KL STS |
| 147 | RFKKTWKLRALKEGK | IL6R STS |
| 148 | KLRKRHRKH | EFNB1 STS |
| 149 | RRRCGQKKK | CD44 STS |
| 150 | RIRAAHRRTMR | CLSTN1 STS |
| 151 | RNWKRKNTK | LRP8 STS |
| 152 | KVYKWKQSR | PCDHGC3 STS |
| 153 | KTKKQRKKLHDRLR | NRG1 STS |
| 154 | KRKRRTKTIRR | LRP1B STS |
| 155 | RKRRKERERSRLPR | JAG2 STS |
| 156 | KYRRRHRKH | EFNB2 STS |
| 157 | RLRLQKHR | DLL1 STS |
| 158 | RVRIAHQH | CLSTN2 STS |
| 159 | RKKRMAKYEK | EPCAM STS |
| 160 | RRKSIKKKRALRR | ErbB4 STS |
| 161 | RSRKVDKR | KCNE3 STS |
| 162 | KRRDKERQAK | CDH2 STS |
| 163 | KTKKQRKQMHNHLR | NRG2 STS |
| 164 | KKSKLAKKRK | PTPRK STS |
| 165 | HPLRKRRKRKKK | BTC STS |
| 166 | RRRSKYSKAK | EPHA4 STS |
| 167 | HRRCKHRTGK | IL1R2 STS |
| 168 | KSKRREKK | KCNE4 STS |
| 169 | KCVRRKKEQK | SCN2B STS |
| 170 | KCWRSHKQR | Nradd STS |
| 171 | KKRKLAKKRK | PTPRM STS |
| 172 | KRKRKH | Notch2 STS |
| 173 | RRKREH | Notch3 STS |
| 174 | RRRRREH | Notch4 STS |
| 175 | MALPVTALLLPLALLLHAARPEQKLISEEDLDIQMTQTTSSLSASLGDRVT | ECD (extra- |
| | ISCRASQDISKYLNWYQQKPDGTVKLLIYHTSRLHSGVPSRFSGSGSGTD | cellular |
| | YSLTISNLEQEDIATYFCQQGNTLPYTFGGGTKLEITGGGGSGGGGSGGG | binding |
| | GSEVKLQESGPGLVAPSQSLSVTCTVSGVSLPDYGVSWIRQPPRKGLEWL | domain) |
| | GVIWGSETTYYNSALKSRLTIIKDNSKSQVFLKMNSLQTDDTAIYYCAKH | |
| | YYYGGSYAMDYWGQGTSVTVSS | |
| 176 | MALPVTALLLPLALLLHAARP | CD8A signal |
| | | sequence |
| 177 | EQKLISEEDL | Myc tag |
| 178 | ILDYSFGGGAGRDIPPPLIEEACELPECQEDAGNKVCSLQCNNHACGWDG | SynNotch1 |
| | GDCSLNFNDPWKNCTQSLQCWKYFSDGHCDSQCNSAGCLFDGFDCQRA | JMD |
| | EGQCNPLYDQYCKDHFSDGHCDQGCNSAECEWDGLDCAEHVPERLAAG | |
| | TLVVVVLMPPEQLRNSSFHFLRELSRVLHTNVVFKRDAHGQQMIFPYYG | |
| | REEELRKHPIKRAAEGWAAPDALLGQVKASLLPGGSEGGRRRRELDPMD | |
| | VRGSIVYLEIDNRQCVQASSQCFQSATDVAAFLGALASLGSLNIPYKIEAV | |
| | QSETVEPPPPAQLH | |
| 179 | ILDYSFGGGAGRDIPPPLIEETVEPPPPAQLH | Mini Notch LP |
| 180 | TTTPAPRPPTPAPTIASQPLSLRPEAC | Hinge Notch |
| | | LP |
| 181 | FMYVAAAAFVLLFFVGCGVLLS | Notch1 TMD |
| 182 | MKLLSSIEQACDICRLKKLKCSKEKPKCAKCLKNNWECRYSPKTKRSPLT | ICD |
| | RAHLTEVESRLERLEQLFLLIFPREDLDMILKMDSLQDIKALLTGLFVQDN | |
| | VNKDAVTDRLASVETDMPLTLRQHRISATSSSEESSNKGQRQLTVSAAA | |
| | GGSGGSGGSDALDDFDLDMLGSDALDDFDLDMLGSDALDDFDLDMLGS | |
| | DALDDFDLDMLGS | |
| 183 | LYTAPPSTPPATSLTPERTQ | Notch2 JMD |
| 184 | APAAAPEVSEEPRPLEPPEPSVPL | Notch3 JMD |
| 185 | VHPHAGTAPPANQLPW | Notch4 JMD |
| 186 | DYKDHDGDYKDHDIDYKDDDDKPVEPPLPSQLH | 3x Flag + 11 |
| | | Notch1 JMD |
| | | aa |
| 187 | GGSGGSGGSGGSGGSGGSLH | (GGS)3 |
| | | Minimal |
| | | Linker linker |
| 188 | GGSGGSGGSPLGVRGKGGSGGSGGSLH | (GGS)3 with |
| | | MMP9 site |
| 189 | GGSGGSGGSSPLAQAVRSSSRGGSGGSGGSLH | (GGS)3 with |
| | | ADAM 17 site |
| 190 | TTTPAPRPPTPAPTIASQPLSLRPEACRPAAGGAVHTRGLDFACD | CD8A Hinge |
| | | linker |
| 191 | TTTPAPRPPTPAPTIASQPLSLRPEAC | CD8A |
| | | truncated |
| | | Hinge linker |
| 192 | IEVMYPPPYLDNEKSNGTIIHVKGKHLCPSPLFPGPSKP | CD28 Hinge |
| | | linker |
| 193 | GGGGSGGGGSGGGGSESKYGPPCPPCP | (GGGGS)3 + |
| | | IgG4 Hinge |
| | | linker |
| 194 | LHCVGDTYPSNDRCCHECRPGNGMVSRCSRSQNTVCRPCGPGFYNDVVS | OX40 Hinge |
| | SKPCKPCTWCNLRSGSERKQLCTATQDTVCRCRAGTQPLDSYKPGVDCA | linker |
| | PCPPGHFSPGDNQACKPWTNCTLAGKHTLQPASNSSDAICEDRDPPATQP | |
| | QETQGPPARPITVQPTEAWPRTSQGPSTRPVEVPGGRA | |
| 195 | KTLEEAPSAPPQGVTVSKNDGNGTAILVSWQPPPEDTQNGMVQEYKVW | Robo Fn linker |
| | CLGNETRYHINKTVDGSTFSVVIPFLVPGIRYSVEVAASTGAGSGVKSEPQ | |
| | FIQLDAHGNPVSPEDQVSLAQQISDVVKQP | |
| 196 | KTLEEAPSAPPQGVTVSKNDGNGTAILVSWQPPPEDTQNGMVQEYKVW | Truncated Fn |
| | CLGNETRYHINKTVDGSTFSVVIPFLVPGIRYSVEVAASTGAGSGVKSEPQ | linker |
| | FIQLDVVKQP | |
| 197 | KTLEEAPSAPPQGVTVSKNDGNGTAILVSWQPPPEDTQNGMVQEYKVW | Truncated Fn |
| | CLGNETRYHINKTVDGSTFSVVIPFLVPGIRYSVEVAASTGAGSGVKSEPQ | linker + |
| | FIQLDGGSGGSGGS | (GGS)3 |
| 198 | KTLEEAPSAPPQGVTVSKNDGNGTAILVSWQPPPEDTQNGMVQEYKVW | Truncated Fn |
| | CLGNETRYHINKTVDGSTFSVVIPFLVPGIRYSVEVAASTGAGSGVKSEPQ | linker + |
| | FIQLDEPPPPAQLH | Notch 1 |
| 199 | MALPVTALLLPLALLLHAARPEQKLISEEDLDIQMTQTTSSLSASLGDRVT | MiniNotch |
| | ISCRASQDISKYLNWYQQKPDGTVKLLIYHTSRLHSGVPSRFSGSGSGTD | (2, 2, 2) |
| | YSLTISNLEQEDIATYFCQQGNTLPYTFGGGTKLEITGGGGSGGGGSGGG | |
| | GSEVKLQESGPGLVAPSQSLSVTCTVSGVSLPDYGVSWIRQPPRKGLEWL | |
| | GVIWGSETTYYNSALKSRLTIIKDNSKSQVFLKMNSLQTDDTAIYYCAKH | |
| | YYYGGSYAMDYWGQGTSVTVSSLYTAPPSTPPATSLTPERTQLLYLLAV | |
| | AVVIILFIILLGVIMAKRKRKHMKLLSSIEQACDICRLKKLKCSKEKPKCA | |
| | KCLKNNWECRYSPKTKRSPLTRAHLTEVESRLERLEQLFLLIFPREDLDMI | |
| | LKMDSLQDIKALLTGLFVQDNVNKDAVTDRLASVETDMPLTLRQHRISA | |
| | TSSSEESSNKGQRQLTVSAAAGGSGGSGGSDALDDFDLDMLGSDALDDF | |
| | DLDMLGSDALDDFDLDMLGSDALDDFDLDMLGS | |
| 200 | MALPVTALLLPLALLLHAARPEQKLISEEDLDIQMTQTTSSLSASLGDRVT | MiniNotch |
| | ISCRASQDISKYLNWYQQKPDGTVKLLIYHTSRLHSGVPSRFSGSGSGTD | (2, 1, 1) |
| | YSLTISNLEQEDIATYFCQQGNTLPYTFGGGTKLEITGGGGSGGGGSGGG | |
| | GSEVKLQESGPGLVAPSQSLSVTCTVSGVSLPDYGVSWIRQPPRKGLEWL | |
| | GVIWGSETTYYNSALKSRLTIIKDNSKSQVFLKMNSLQTDDTAIYYCAKH | |
| | YYYGGSYAMDYWGQGTSVTVSSLYTAPPSTPPATSLTPERTQFMYVAAA | |
| | AFVLLFFVGCGVLLSRKRRRMKLLSSIEQACDICRLKKLKCSKEKPKCAK | |
| | CLKNNWECRYSPKTKRSPLTRAHLTEVESRLERLEQLFLLIFPREDLDMIL | |
| | KMDSLQDIKALLTGLFVQDNVNKDAVTDRLASVETDMPLTLRQHRISAT | |
| | SSSEESSNKGQRQLTVSAAAGGSGGSGGSDALDDFDLDMLGSDALDDFD | |
| | LDMLGSDALDDFDLDMLGSDALDDFDLDMLGS | |
| 201 | MALPVTALLLPLALLLHAARPEQKLISEEDLDIQMTQTTSSLSASLGDRVT | MiniNotch |
| | ISCRASQDISKYLNWYQQKPDGTVKLLIYHTSRLHSGVPSRFSGSGSGTD | (2, 1, 2) |
| | YSLTISNLEQEDIATYFCQQGNTLPYTFGGGTKLEITGGGGSGGGGSGGG | |
| | GSEVKLQESGPGLVAPSQSLSVTCTVSGVSLPDYGVSWIRQPPRKGLEWL | |
| | GVIWGSETTYYNSALKSRLTIIKDNSKSQVFLKMNSLQTDDTAIYYCAKH | |
| | YYYGGSYAMDYWGQGTSVTVSSFMYVAAAAFVLLFFVGCGVLLSKRK | |
| | RKHMKLLSSIEQACDICRLKKLKCSKEKPKCAKCLKNNWECRYSPKTKR | |
| | SPLTRAHLTEVESRLERLEQLFLLIFPREDLDMILKMDSLQDIKALLTGLF | |
| | VQDNVNKDAVTDRLASVETDMPLTLRQHRISATSSSEESSNKGQRQLTV | |
| | SAAAGGSGGSGGSDALDDFDLDMLGSDALDDFDLDMLGSDALDDFDLD | |
| | MLGSDALDDFDLDMLGS | |
| 202 | MALPVTALLLPLALLLHAARPEQKLISEEDLDIQMTQTTSSLSASLGDRVT | SynNotch |
| | ISCRASQDISKYLNWYQQKPDGTVKLLIYHTSRLHSGVPSRFSGSGSGTD | (1, 1, 1) |
| | YSLTISNLEQEDIATYFCQQGNTLPYTFGGGTKLEITGGGGSGGGGSGGG | |
| | GSEVKLQESGPGLVAPSQSLSVTCTVSGVSLPDYGVSWIRQPPRKGLEWL | |
| | GVIWGSETTYYNSALKSRLTIIKDNSKSQVFLKMNSLQTDDTAIYYCAKH | |
| | YYYGGSYAMDYWGQGTSVTVSSILDYSFGGGAGRDIPPPLIEEACELPEC | |
| | QEDAGNKVCSLQCNNHACGWDGGDCSLNFNDPWKNCTQSLQCWKYFS | |
| | DGHCDSQCNSAGCLFDGFDCQRAEGQCNPLYDQYCKDHFSDGHCDQGC | |
| | NSAECEWDGLDCAEHVPERLAAGTLVVVVLMPPEQLRNSSFHFLRELSR | |
| | VLHTNVVFKRDAHGQQMIFPYYGREEELRKHPIKRAAEGWAAPDALLG | |
| | QVKASLLPGGSEGGRRRRELDPMDVRGSIVYLEIDNRQCVQASSQCFQSA | |
| | TDVAAFLGALASLGSLNIPYKIEAVQSETVEPPPPAQLHFMYVAAAAFVL | |
| | LFFVGCGVLLSRKRRRMKLLSSIEQACDICRLKKLKCSKEKPKCAKCLKN | |
| | NWECRYSPKTKRSPLTRAHLTEVESRLERLEQLFLLIFPREDLDMILKMDS | |
| | LQDIKALLTGLFVQDNVNKDAVTDRLASVETDMPLTLRQHRISATSSSEE | |
| | SSNKGQRQLTVSAAAGGSGGSGGSDALDDFDLDMLGSDALDDFDLDML | |
| | GSDALDDFDLDMLGSDALDDFDLDMLGS | |
| 203 | MALPVTALLLPLALLLHAARPEQKLISEEDLDIQMTQTTSSLSASLGDRVT | pIZ618 |
| | ISCRASQDISKYLNWYQQKPDGTVKLLIYHTSRLHSGVPSRFSGSGSGTD | SynNotch |
| | YSLTISNLEQEDIATYFCQQGNTLPYTFGGGTKLEITGGGGSGGGGSGGG | (1, 1, 2) |
| | GSEVKLQESGPGLVAPSQSLSVTCTVSGVSLPDYGVSWIRQPPRKGLEWL | |
| | GVIWGSETTYYNSALKSRLTIIKDNSKSQVFLKMNSLQTDDTAIYYCAKH | |
| | YYYGGSYAMDYWGQGTSVTVSSILDYSFGGGAGRDIPPPLIEEACELPEC | |
| | QEDAGNKVCSLQCNNHACGWDGGDCSLNFNDPWKNCTQSLQCWKYFS | |
| | DGHCDSQCNSAGCLFDGFDCQRAEGQCNPLYDQYCKDHFSDGHCDQGC | |
| | NSAECEWDGLDCAEHVPERLAAGTLVVVVLMPPEQLRNSSFHFLRELSR | |
| | VLHTNVVFKRDAHGQQMIFPYYGREEELRKHPIKRAAEGWAAPDALLG | |
| | QVKASLLPGGSEGGRRRRELDPMDVRGSIVYLEIDNRQCVQASSQCFQSA | |
| | TDVAAFLGALASLGSLNIPYKIEAVQSETVEPPPPAQLHFMYVAAAAFVL | |
| | LFFVGCGVLLSKRKRKHMKLLSSIEQACDICRLKKLKCSKEKPKCAKCLK | |
| | NNWECRYSPKTKRSPLTRAHLTEVESRLERLEQLFLLIFPREDLDMILKM | |
| | DSLQDIKALLTGLFVQDNVNKDAVTDRLASVETDMPLTLRQHRISATSSS | |
| | EESSNKGQRQLTVSAAAGGSGGSGGSDALDDFDLDMLGSDALDDFDLD | |
| | MLGSDALDDFDLDMLGSDALDDFDLDMLGS | |
| 204 | MALPVTALLLPLALLLHAARPEQKLISEEDLDIQMTQTTSSLSASLGDRVT | pIZ343 Hinge |
| | ISCRASQDISKYLNWYQQKPDGTVKLLIYHTSRLHSGVPSRFSGSGSGTD | Notch (1, 1, 1) |
| | YSLTISNLEQEDIATYFCQQGNTLPYTFGGGTKLEITGGGGSGGGGSGGG | |
| | GSEVKLQESGPGLVAPSQSLSVTCTVSGVSLPDYGVSWIRQPPRKGLEWL | |
| | GVIWGSETTYYNSALKSRLTIIKDNSKSQVFLKMNSLQTDDTAIYYCAKH | |
| | YYYGGSYAMDYWGQGTSVTVSSTTTPAPRPPTPAPTIASQPLSLRPEACF | |
| | MYVAAAAFVLLFFVGCGVLLSRKRRRMKLLSSIEQACDICRLKKLKCSK | |
| | EKPKCAKCLKNNWECRYSPKTKRSPLTRAHLTEVESRLERLEQLFLLIFPR | |
| | EDLDMILKMDSLQDIKALLTGLFVQDNVNKDAVTDRLASVETDMPLTLR | |
| | QHRISATSSSEESSNKGQRQLTVSAAAGGSGGSGGSDALDDFDLDMLGS | |
| | DALDDFDLDMLGSDALDDFDLDMLGSDALDDFDLDMLGS | |
| 205 | MALPVTALLLPLALLLHAARPEQKLISEEDLDIQMTQTTSSLSASLGDRVT | pIZ361 Hinge |
| | ISCRASQDISKYLNWYQQKPDGTVKLLIYHTSRLHSGVPSRFSGSGSGTD | Notch (1, 1, 2) |
| | YSLTISNLEQEDIATYFCQQGNTLPYTFGGGTKLEITGGGGSGGGGSGGG | |
| | GSEVKLQESGPGLVAPSQSLSVTCTVSGVSLPDYGVSWIRQPPRKGLEWL | |
| | GVIWGSETTYYNSALKSRLTIIKDNSKSQVFLKMNSLQTDDTAIYYCAKH | |
| | YYYGGSYAMDYWGQGTSVTVSSTTTPAPRPPTPAPTIASQPLSLRPEACF | |
| | MYVAAAAFVLLFFVGCGVLLSKRKRKHMKLLSSIEQACDICRLKKLKCS | |
| | KEKPKCAKCLKNNWECRYSPKTKRSPLTRAHLTEVESRLERLEQLFLLIF | |
| | PREDLDMILKMDSLQDIKALLTGLFVQDNVNKDAVTDRLASVETDMPLT | |
| | LRQHRISATSSSEESSNKGQRQLTVSAAAGGSGGSGGSDALDDFDLDML | |
| | GSDALDDFDLDMLGSDALDDFDLDMLGSDALDDFDLDMLGS | |
| 206 | LLYLLAVAVVIILFIILLGVIMA | Notch2 TMD |
| 207 | RKRRR | Notch 1 STS |
| 208 | MALPVTALLLPLALLLHAARPEQKLISEEDLDIQMTQTTSSLSASLGDRVT | pRay050 |
| | ISCRASQDISKYLNWYQQKPDGTVKLLIYHTSRLHSGVPSRFSGSGSGTD | miniNotch |
| | YSLTISNLEQEDIATYFCQQGNTLPYTFGGGTKLEITGGGGSGGGGSGGG | (1, 1, 1) |
| | GSEVKLQESGPGLVAPSQSLSVTCTVSGVSLPDYGVSWIRQPPRKGLEWL | |
| | GVIWGSETTYYNSALKSRLTIIKDNSKSQVFLKMNSLQTDDTAIYYCAKH | |
| | YYYGGSYAMDYWGQGTSVTVSSILDYSFGGGAGRDIPPPLIEETVEPPPP | |
| | AQLHFMYVAAAAFVLLFFVGCGVLLSRKRRRMKLLSSIEQACDICRLKK | |
| | LKCSKEKPKCAKCLKNNWECRYSPKTKRSPLTRAHLTEVESRLERLEQLF | |
| | LLIFPREDLDMILKMDSLQDIKALLTGLFVQDNVNKDAVTDRLASVETD | |
| | MPLTLRQHRISATSSSEESSNKGQRQLTVSAAAGGSGGSGGSDALDDFDL | |
| | DMLGSDALDDFDLDMLGSDALDDFDLDMLGSDALDDFDLDMLGS | |
| 209 | MALPVTALLLPLALLLHAARPEQKLISEEDLDIQMTQTTSSLSASLGDRVT | pIZ621 |
| | ISCRASQDISKYLNWYQQKPDGTVKLLIYHTSRLHSGVPSRFSGSGSGTD | miniNotch |
| | YSLTISNLEQEDIATYFCQQGNTLPYTFGGGTKLEITGGGGSGGGGSGGG | (1, 1, 2) |
| | GSEVKLQESGPGLVAPSQSLSVTCTVSGVSLPDYGVSWIRQPPRKGLEWL | |
| | GVIWGSETTYYNSALKSRLTIIKDNSKSQVFLKMNSLQTDDTAIYYCAKH | |
| | YYYGGSYAMDYWGQGTSVTVSSILDYSFGGGAGRDIPPPLIEETVEPPPP | |
| | AQLHFMYVAAAAFVLLFFVGCGVLLSKRKRKHMKLLSSIEQACDICRLK | |
| | KLKCSKEKPKCAKCLKNNWECRYSPKTKRSPLTRAHLTEVESRLERLEQ | |
| | LFLLIFPREDLDMILKMDSLQDIKALLTGLFVQDNVNKDAVTDRLASVET | |
| | DMPLTLRQHRISATSSSEESSNKGQRQLTVSAAAGGSGGSGGSDALDDFD | |
| | LDMLGSDALDDFDLDMLGSDALDDFDLDMLGSDALDDFDLDMLGS | |
| 210 | cgataccgtcgaccaaggcagctgtagatcttagccactttttaaaagaaaaggggggactggaagggctaattcac | pHR-SIN-pGK |
| | tcccaacgaagacaagatctgctttttgcttgtactgggtctctctggttagaccagatctgagcctgggagctctctgg | (the BamH1 |
| | ctaactagggaacccactgcttaagcctcaataaagcttgccttgagtgcttcaagtagtgtgtgcccgtctgttgtgtg | site is under- |
| | actctggtaactagagatccctcagacccttttagtcagtgtggaaaatctctagcagcatctagaattaattccgtgtat | lined) |
| | tctatagtgtcacctaaatcgtatgtgtatgatacataaggttatgtattaattgtagccgcgttctaacgacaatatgtac | |
| | aagcctaattgtgtagcatctggcttactgaagcagaccctatcatctctctcgtaaactgccgtcagagtcggtttggtt | |
| | ggacgaaccttctgagtttctggtaacgccgtcccgcacccggaaatggtcagcgaaccaatcagcagggtcatcg | |
| | ctagccagatcctctacgccggacgcatcgtggccggcatcaccggcgccacaggtgcggttgctggcgcctatat | |
| | cgccgacatcaccgatggggaagatcgggctcgccacttcgggctcatgagcgcttgtttcggcgtgggtatggtg | |
| | gcaggccccgtggccgggggactgttgggcgccatctccttgcatgcaccattccttgcggcggcggtgctcaacg | |
| | gcctcaacctactactgggctgcttcctaatgcaggagtcgcataagggagagcgtcgaatggtgcactctcagtac | |
| | aatctagctctgatgccgcatagttaagccagccccgacacccgccaacacccgctgacgcgccctgacgggcttg | |
| | tctgctcccggcatccgcttacagacaagctgtgaccgtctccgggagctgcatgtgtcagaggttttcaccgtcatc | |
| | accgaaacgcgcgagacgaaagggcctcgtgatacgcctatttttataggttaatgtcatgataataatggtttcttaga | |
| | cgtcaggtggcacttttcggggaaatgtgcgcggaacccctatttgtttatttttctaaatacattcaaatatgtatccgct | |
| | catgagacaataaccctgataaatgcttcaataatattgaaaaaggaagagtatgagtattcaacatttccgtgtcgccc | |
| | ttattcccttttttgcggcattttgccttcctgtttttgctcacccagaaacgctggtgaaagtaaaagatgctgaagatca | |
| | gttgggtgcacgagtgggttacatcgaactggatctcaacagcggtaagatccttgagagttttcgccccgaagaac | |
| | gttttccaatgatgagcacttttaaagttctgctatgtggcgcggtattatcccgtattgacgccgggcaagagcaactc | |
| | ggtcgccgcatacactattctcagaatgacttggttgagtactcaccagtcacagaaaagcatcttacggatggcatg | |
| | acagtaagagaattatgcagtgctgccataaccatgagtgataacactgcggccaacttacttctgacaacgatcgga | |
| | ggaccgaaggagctaaccgcttttttgcacaacatgggggatcatgtaactcgccttgatcgttgggaaccggagct | |
| | gaatgaagccataccaaacgacgagcgtgacaccacgatgcctgtagcaatggcaacaacgttgcgcaaactatta | |
| | actggcgaactacttactctagcttcccggcaacaattaatagactggatggaggcggataaagttgcaggaccactt | |
| | ctgcgctcggcccttccggctggctggtttattgctgataaatctggagccggtgagcgtgggtctcgcggtatcattg | |
| | cagcactggggccagatggtaagccctcccgtatcgtagttatctacacgacggggagtcaggcaactatggatga | |
| | acgaaatagacagatcgctgagataggtgcctcactgattaagcattggtaactgtcagaccaagtttactcatatata | |
| | ctttagattgatttaaaacttcatttttaatttaaaaggatctaggtgaagatcctttttgataatctcatgaccaaaatccctt | |
| | aacgtgagttttcgttccactgagcgtcagaccccgtagaaaagatcaaaggatcttcttgagatcctttttttctgcgcg | |
| | taatctgctgcttgcaaacaaaaaaaccaccgctaccagcggtggtttgtttgccggatcaagagctaccaactcttttt | |
| | ccgaaggtaactggcttcagcagagcgcagataccaaatactgtccttctagtgtagccgtagttaggccaccacttc | |
| | aagaactctgtagcaccgcctacatacctcgctctgctaatcctgttaccagtggctgctgccagtggcgataagtcgt | |
| | gtcttaccgggttggactcaagacgatagttaccggataaggcgcagcggtcgggctgaacggggggttcgtgca | |
| | cacagcccagcttggagcgaacgacctacaccgaactgagatacctacagcgtgagctatgagaaagcgccacg | |
| | cttcccgaagggagaaaggcggacaggtatccggtaagcggcagggtcggaacaggagagcgcacgagggag | |
| | cttccagggggaaacgcctggtatctttatagtcctgtcgggtttcgccacctctgacttgagcgtcgatttttgtgatgc | |
| | tcgtcaggggggcggagcctatggaaaaacgccagcaacgcggcctttttacggttcctggccttttgctggcctttt | |
| | gctcacatgttctttcctgcgttatcccctgattctgtggataaccgtattaccgcctttgagtgagctgataccgctcgc | |
| | cgcagccgaacgaccgagcgcagcgagtcagtgagcgaggaagcggaagagcgcccaatacgcaaaccgcct | |
| | ctccccgcgcgttggccgattcattaatgcagctgtggaatgtgtgtcagttagggtgtggaaagtccccaggctccc | |
| | cagcaggcagaagtatgcaaagcatgcatctcaattagtcagcaaccaggtgtggaaagtccccaggctccccagc | |
| | aggcagaagtatgcaaagcatgcatctcaattagtcagcaaccatagtcccgcccctaactccgcccatcccgcccc | |
| | taactccgcccagttccgcccattctccgccccatggctgactaattttttttatttatgcagaggccgaggccgcctcg | |
| | gcctctgagctattccagaagtagtgaggaggcttttttggaggcctaggcttttgcaaaaagcttggacacaagaca | |
| | ggcttgcgagatatgtttgagaataccactttatcccgcgtcagggagaggcagtgcgtaaaaagacgcggactcat | |
| | gtgaaatactggtttttagtgcgccagatctctataatctcgcgcaacctattttcccctcgaacactttttaagccgtaga | |
| | taaacaggctgggacacttcacatgagcgaaaaatacatcgtcacctgggacatgttgcagatccatgcacgtaaac | |
| | tcgcaagccgactgatgccttctgaacaatggaaaggcattattgccgtaagccgtggcggtctgtaccgggtgcgtt | |
| | actggcgcgtgaactgggtattcgtcatgtcgataccgtttgtatttccagctacgatcacgacaaccagcgcgagctt | |
| | aaagtgctgaaacgcgcagaaggcgatggcgaaggcttcatcgttattgatgacctggtggataccggtggtactgc | |
| | ggttgcgattcgtgaaatgtatccaaaagcgcactttgtcaccatcttcgcaaaaccggctggtcgtccgctggttgat | |
| | gactatgttgttgatatcccgcaagatacctggattgaacagccgtgggatatgggcgtcgtattcgtcccgccaatct | |
| | ccggtcgctaatcttttcaacgcctggcactgccgggcgttgttctttttaacttcaggcgggttacaatagtttccagta | |
| | agtattctggaggctgcatccatgacacaggcaaacctgagcgaaaccctgttcaaaccccgctttaaacatcctgaa | |
| | acctcgacgctagtccgccgctttaatcacggcgcacaaccgcctgtgcagtcggcccttgatggtaaaaccatccc | |
| | tcactggtatcgcatgattaaccgtctgatgtggatctggcgcggcattgacccacgcgaaatcctcgacgtccaggc | |
| | acgtattgtgatgagcgatgccgaacgtaccgacgatgatttatacgatacggtgattggctaccgtggcggcaactg | |
| | gatttatgagtgggccccggatctttgtgaaggaaccttacttctgtggtgtgacataattggacaaactacctacaga | |
| | gatttaaagctctaaggtaaatataaaatttttaagtgtataatgtgttaaactactgattctaattgtttgtgtattttaga | |
| | ttccaacctatggaactgatgaatgggagcagtggtggaatgcctttaatgaggaaaacctgttttgctcagaagaaatgc | |
| | catctagtgatgatgaggctactgctgactctcaacattctactcctccaaaaaagaagagaaaggtagaagacccca | |
| | aggactttccttcagaattgctaagttttttgagtcatgctgtgtttagtaatagaactcttgcttgctttgctatttacaccac | |
| | aaaggaaaaagctgcactgctatacaagaaaattatggaaaaatattctgtaacctttataagtaggcataacagttata | |
| | atcataacatactgttttttcttactccacacaggcatagagtgtctgctattaataactatgctcaaaaattgtgtaccttta | |
| | gctttttaatttgtaaaggggttaataaggaatatttgatgtatagtgccttgactagagatcataatcagccataccacat | |
| | ttgtagaggttttacttgctttaaaaaacctcccacacctccccctgaacctgaaacataaaatgaatgcaattgttgttgt | |
| | taacttgtttattgcagcttataatggttacaaataaagcaatagcatcacaaatttcacaaataaagcatttttttcactgc | |
| | attctagttgtggtttgtccaaactcatcaatgtatcttatcatgtctggatcaactggataactcaagctaaccaaaatca | |
| | tcccaaacttcccaccccataccctattaccactgccaattacctagtggtttcatttactctaaacctgtgattcctctga | |
| | attattttcattttaaagaaattgtatttgttaaatatgtactacaaacttagtagttggaagggctaattcactcccaaagaa | |
| | gacaagatatccttgatctgtggatctaccacacacaaggctacttccctgattagcagaactacacaccagggccag | |
| | gggtcagatatccactgacctttggatggtgctacaagctagtaccagttgagccagataaggtagaagaggccaat | |
| | aaaggagagaacaccagcttgttacaccctgtgagcctgcatgggatggatgacccggagagagaagtgttagagt | |
| | ggaggtttgacagccgcctagcatttcatcacgtggcccgagagctgcatccggagtacttcaagaactgctgatatc | |
| | gagcttgctacaagggactttccgctggggactttccagggaggcgtggcctgggcgggactggggagtggcga | |
| | gccctcagatcctgcatataagcagctgctttttgcctgtactgggtctctctggttagaccagatctgagcctgggag | |
| | ctctctggctaactagggaacccactgcttaagcctcaataaagcttgccttgagtgcttcaagtagtgtgtgcccgtct | |
| | gttgtgtgactctggtaactagagatccctcagacccttttagtcagtgtggaaaatctctagcagtggcgcccgaaca | |
| | gggacttgaaagcgaaagggaaaccagaggagctctctcgacgcaggactcggcttgctgaagcgcgcacggca | |
| | agaggcgaggggcggcgactggtgagtacgccaaaaattttgactagcggaggctagaaggagagagatgggtg | |
| | cgagagcgtcagtattaagcgggggagaattagatcgcgatgggaaaaaattcggttaaggccagggggaaaga | |
| | aaaaatataaattaaaacatatagtatgggcaagcagggagctagaacgattcgcagttaatcctggcctgttagaaa | |
| | catcagaaggctgtagacaaatactgggacagctacaaccatcccttcagacaggatcagaagaacttagatcattat | |
| | ataatacagtagcaaccctctattgtgtgcatcaaaggatagagataaaagacaccaaggaagctttagacaagata | |
| | gaggaagagcaaaacaaaagtaagaccaccgcacagcaagcggccggtgatcttcagacctggacgatatatatg | |
| | agggacaattggagaagtgaattatataaatataaagtagtaaaaattgaaccattaggagtagcacccaccaaggc | |
| | aaagagaagagtggtgcagagagaaaaaagagcagtgggaataggagctttgttccttgggttcttgggagcagca | |
| | ggaagcactatgggcgcagcgtcaatgacgctgacggtacaggccagacaattattgtctggtatagtgcagcagc | |
| | agaacaatttgctgagggctattgaggcgcaacagcatctgttgcaactcacagtctggggcatcaagcagctccag | |
| | gcaagaatcctggctgtggaaagatacctaaaggatcaacagctcctggggatttggggttgctctggaaaactcatt | |
| | tgcaccactgctgtgccttggaatgctagttggagtaataaatctctggaacagatttggaatcacacgacctggatgg | |
| | agtgggacagagaaattaacaattacacaagcttaatacactccttaattgaagaatcgcaaaaccagcaagaaaag | |
| | aatgaacaagaattattggaattagataaatgggcaagtttgtggaattggtttaacataacaaattggctgtggtatata | |
| | aaattattcataatgatagtaggaggcttggtaggtttaagaatagtttttgctgtactttctatagtgaatagagttaggca | |
| | gggatattcaccattatcgtttcagacccacctcccaaccccgaggggacccgacaggcccgaaggaatagaaga | |
| | agaaggtggagagagagacagagacagatccattcgattagtgaacggatctcgacggtcgccaaatggcagtatt | |
| | catccacaattttaaaagaaaaggggggattggggggtacagtgcaggggaaagaatagtagacataatagcaac | |
| | agacatacaaactaaagaattacaaaaacaaattacaaaaattcaaaattttcgggtttattacagggacagcagagat | |
| | ccagtttggatcgataagcttgatatcgaattgggtaggggaggcgcttttcccaaggcagtctggagcatgcgcttta | |
| | gcagccccgctgggcacttggcgctacacaagtggcctctggcctcgcacacattccacatccaccggtaggcgc | |
| | caaccggctccgttctttggtggccccttcgcgccaccttctactcctcccctagtcaggaagttcccccccgccccg | |
| | cagctcgcgtcgtgcaggacgtgacaaatggaagtagcacgtctcactagtctcgtgcagatggacagcaccgctg | |
| | agcaatggaagcgggtaggcctttggggcagcggccaatagcagctttgctccttcgctttctgggctcagaggctg | |
| | ggaaggggtgggtccgggggcgggctcaggggcgggctcaggggcggggcgggcgcccgaaggtcctccgg | |
| | aggcccggcattctgcacgcttcaaaagcgcacgtctgccgcgctgttctcctcttcctcatctccgggcctttcgaatt | |
| | ctcacgcgtcaagtggagcaaggcaggtggacagtggatccttgacttgcggccgcaactcccacctgcaacatgc | |
| | gtgactgactgaggccgcgactctagagtcgacctgcaggcatgcaagcttgatatcaagcttatcgataatcaacct | |
| | ctggattacaaaatttgtgaaagattgactggtattcttaactatgttgctccttttacgctatgtggatacgctgctttaatg | |
| | cctttgtatcatgctattgcttcccgtatggctttcattttctcctccttgtataaatcctggttgctgtctctttatgaggag | |
| | ttgtggcccgttgtcaggcaacgtggcgtggtgtgcactgtgtttgctgacgcaacccccactggttggggcattgcca | |
| | ccacctgtcagctcctttccgggactttcgctttccccctccctattgccacggcggaactcatcgccgcctgccttgc | |
| | ccgctgctggacaggggctcggctgttgggcactgacaattccgtggtgttgtcggggaaatcatcgtcctttccttg | |
| | gctgctcgcctgtgttgccacctggattctgcgcgggacgtccttctgctacgtcccttcggccctcaatccagcgga | |
| | ccttccttcccgcggcctgctgccggctctgcggcctcttccgcgtcttcgccttcgccctcagacgagtcggatctcc | |
| | ctttgggccgcctccccgcat | |
| 211 | PXXHy (wherein, X represents an arbitrary residue; Hy, a hydrophobic residue such | Exemplary |
| | as Leu, Ile, Val, Phe, Trp, Tyr, Val, Met, and Pro) | cleavage |
| | | sequence of |
| | | MMP-9 |
| 212 | PXXHy(S/T) (wherein, X represents an arbitrary residue; Hy, a hydrophobic residue | Exemplary |
| | such as Leu, Ile, Val, Phe, Trp, Tyr, Val, Met, and Pro) | cleavage |
| | | sequence of |
| | | MMP-9 |
| 213 | P(L/Q)GMTS | Exemplary |
| | | cleavage |
| | | sequence of |
| | | MMP-9 |
| 214 | P(L/G)GMT | Exemplary |
| | | cleavage |
| | | sequence of |
| | | MMP-9 |
| 215 | VGR | exemplary |
| | | urokinase-type |
| | | plasminogen |
| | | activator (uPA) |
| | | or tissue |
| | | plasminogen |
| | | activator (tPA) |
| | | cleavage site |
| 216 | ENLYTQS | exemplary |
| | | tobacco etch |
| | | virus (TEV) |
| | | protease |
| | | cleavage site |
| 217 | DDDDK | exemplary |
| | | enterokinase |
| | | cleavage site |
| 218 | LVPR | exemplary |
| | | thrombin |
| | | cleavage site |
| 219 | MALPVTALLLPLALLLHAARPEQKLISEEDLDIQMTQTTSSLSASLGDRVTISC | pIZ341 |
| | RASQDISKYLNWYQQKPDGTVKLLIYHTSRLHSGVPSRFSGSGSGTDYSLTIS | 556 |
| | NLEQEDIATYFCQQGNTLPYTFGGGTKLEITGGGGSGGGGSGGGGSEVKLQE | |
| | SGPGLVAPSQSLSVTCTVSGVSLPDYGVSWIRQPPRKGLEWLGVIWGSETTY | |
| | YNSALKSRLTIIKDNSKSQVFLKMNSLQTDDTAIYYCAKHYYYGGSYAMDY | |
| | WGQGTSVTVSSTTTPAPRPPTPAPTIASQPLSLRPEACRPAAGGAVHTRGLDF | |
| | ACDFMYVAAAAFVLLFFVGCGVLLSRKRRRMKLLSSIEQACDICRLKKLKCS | |
| | KEKPKCAKCLKNNWECRYSPKTKRSPLTRAHLTEVESRLERLEQLFLLIFPRE | |
| | DLDMILKMDSLQDIKALLTGLFVQDNVNKDAVTDRLASVETDMPLTLRQHR | |
| | ISATSSSEESSNKGQRQLTVSAAAGGSGGSGGSDALDDFDLDMLGSDALDDF | |
| | DLDMLGSDALDDFDLDMLGSDALDDFDLDMLGS | |
| 220 | MALPVTALLLPLALLLHAARPEQKLISEEDLDIQMTQTTSSLSASLGDRVTISC | pIZ358 |
| | RASQDISKYLNWYQQKPDGTVKLLIYHTSRLHSGVPSRFSGSGSGTDYSLTIS | 550 |
| | NLEQEDIATYFCQQGNTLPYTFGGGTKLEITGGGGSGGGGSGGGGSEVKLQE | |
| | SGPGLVAPSQSLSVTCTVSGVSLPDYGVSWIRQPPRKGLEWLGVIWGSETTY | |
| | YNSALKSRLTIIKDNSKSQVFLKMNSLQTDDTAIYYCAKHYYYGGSYAMDY | |
| | WGQGTSVTVSSIEVMYPPPYLDNEKSNGTIIHVKGKHLCPSPLFPGPSKPFMY | |
| | VAAAAFVLLFFVGCGVLLSRKRRRMKLLSSIEQACDICRLKKLKCSKEKPKC | |
| | AKCLKNNWECRYSPKTKRSPLTRAHLTEVESRLERLEQLFLLIFPREDLDMIL | |
| | KMDSLQDIKALLTGLFVQDNVNKDAVTDRLASVETDMPLTLRQHRISATSSS | |
| | EESSNKGQRQLTVSAAAGGSGGSGGSDALDDFDLDMLGSDALDDFDLDML | |
| | GSDALDDFDLDMLGSDALDDFDLDMLGS | |
| 221 | MALPVTALLLPLALLLHAARPEQKLISEEDLDIQMTQTTSSLSASLGDRVTISC | pIZ359 |
| | RASQDISKYLNWYQQKPDGTVKLLIYHTSRLHSGVPSRFSGSGSGTDYSLTIS | 538 |
| | NLEQEDIATYFCQQGNTLPYTFGGGTKLEITGGGGSGGGGSGGGGSEVKLQE | |
| | SGPGLVAPSQSLSVTCTVSGVSLPDYGVSWIRQPPRKGLEWLGVIWGSETTY | |
| | YNSALKSRLTIIKDNSKSQVFLKMNSLQTDDTAIYYCAKHYYYGGSYAMDY | |
| | WGQGTSVTVSSGGGGSGGGGSGGGGSESKYGPPCPPCPFMYVAAAAFVLLF | |
| | FVGCGVLLSRKRRRMKLLSSIEQACDICRLKKLKCSKEKPKCAKCLKNNWEC | |
| | RYSPKTKRSPLTRAHLTEVESRLERLEQLFLLIFPREDLDMILKMDSLQDIKAL | |
| | LTGLFVQDNVNKDAVTDRLASVETDMPLTLRQHRISATSSSEESSNKGQRQL | |
| | TVSAAAGGSGGSGGSDALDDFDLDMLGSDALDDFDLDMLGSDALDDFDLD | |
| | MLGSDALDDFDLDMLGS | |
| 222 | MALPVTALLLPLALLLHAARPEQKLISEEDLDIQMTQTTSSLSASLGDRVTISC | pIZ360 |
| | RASQDISKYLNWYQQKPDGTVKLLIYHTSRLHSGVPSRFSGSGSGTDYSLTIS | 697 |
| | NLEQEDIATYFCQQGNTLPYTFGGGTKLEITGGGGSGGGGSGGGGSEVKLQE | |
| | SGPGLVAPSQSLSVTCTVSGVSLPDYGVSWIRQPPRKGLEWLGVIWGSETTY | |
| | YNSALKSRLTIIKDNSKSQVFLKMNSLQTDDTAIYYCAKHYYYGGSYAMDY | |
| | WGQGTSVTVSSLHCVGDTYPSNDRCCHECRPGNGMVSRCSRSQNTVCRPCG | |
| | PGFYNDVVSSKPCKPCTWCNLRSGSERKQLCTATQDTVCRCRAGTQPLDSY | |
| | KPGVDCAPCPPGHFSPGDNQACKPWTNCTLAGKHTLQPASNSSDAICEDRDP | |
| | PATQPQETQGPPARPITVQPTEAWPRTSQGPSTRPVEVPGGRAFMYVAAAAF | |
| | VLLFFVGCGVLLSRKRRRMKLLSSIEQACDICRLKKLKCSKEKPKCAKCLKN | |
| | NWECRYSPKTKRSPLTRAHLTEVESRLERLEQLFLLIFPREDLDMILKMDSLQ | |
| | DIKALLTGLFVQDNVNKDAVTDRLASVETDMPLTLRQHRISATSSSEESSNKG | |
| | QRQLTVSAAAGGSGGSGGSDALDDFDLDMLGSDALDDFDLDMLGSDALDD | |
| | FDLDMLGSDALDDFDLDMLGS | |
| 223 | MALPVTALLLPLALLLHAARPEQKLISEEDLQVQLQQSGGGLVKPGGSLRLS | pIZ343FYIA |
| | CAASGFTFSSYAMHWVRQAPGKGLEWVAVISYDGSNKYYADSVKGRFTISR | 542 |
| | DNSKNTLYLQMDSLRAEDTAVYYCAKEGDSSRWSYDLWGRGTLVTVSSGG | |
| | GGSGGGGSGGGGSQSALTQPASVSGSPGQSITISCTGTSSDVGGYNYVSWYQ | |
| | QHPGKAPKVMIYDVTNRPSGVSNRFSGSKSGNTASLTISGLQAEDEADYYCS | |
| | SYTIASTLVVFGGGTKLTVLTTTPAPRPPTPAPTIASQPLSLRPEACFMYVAAA | |
| | AFVLLFFVGCGVLLSRKRRRMKLLSSIEQACDICRLKKLKCSKEKPKCAKCL | |
| | KNNWECRYSPKTKRSPLTRAHLTEVESRLERLEQLFLLIFPREDLDMILKMDS | |
| | LQDIKALLTGLFVQDNVNKDAVTDRLASVETDMPLTLRQHRISATSSSEESSN | |
| | KGQRQLTVSAAAGGSGGSGGSDALDDFDLDMLGSDALDDFDLDMLGSDAL | |
| | DDFDLDMLGSDALDDFDLDMLGS | |
| 224 | METDTLLLWVLLLWVPGSTGDMVSKGEELFTGVVPILVELDGDVNGHKFSV | pIZ343eGFP |
| | SGEGEGDATYGKLTLKFICTTGKLPVPWPTLVTTLTYGVQCFSRYPDHMKQH | 525 |
| | DFFKSAMPEGYVQERTIFFKDDGNYKTRAEVKFEGDTLVNRIELKGIDFKED | |
| | GNILGHKLEYNYNSHNVYIMADKQKNGIKVNFKIRHNIEDGSVQLADHYQQ | |
| | NTPIGDGPVLLPDNHYLSTQSALSKDPNEKRDHMVLLEFVTAAGITLGMDEL | |
| | YKTTTPAPRPPTPAPTIASQPLSLRPEACFMYVAAAAFVLLFFVGCGVLLSRK | |
| | RRRMKLLSSIEQACDICRLKKLKCSKEKPKCAKCLKNNWECRYSPKTKRSPL | |
| | TRAHLTEVESRLERLEQLFLLIFPREDLDMILKMDSLQDIKALLTGLFVQDNV | |
| | NKDAVTDRLASVETDMPLTLRQHRISATSSSEESSNKGQRQLTVSAAAGGSG | |
| | GSGGSDALDDFDLDMLGSDALDDFDLDMLGSDALDDFDLDMLGSDALDDF | |
| | DLDMLGS | |
| 225 | MALPVTALLLPLALLLHAARPEQKLISEEDLDIQMTQTTSSLSASLGDRVTISC | pIZ342 |
| | RASQDISKYLNWYQQKPDGTVKLLIYHTSRLHSGVPSRFSGSGSGTDYSLTIS | 537 |
| | NLEQEDIATYFCQQGNTLPYTFGGGTKLEITGGGGSGGGGSGGGGSEVKLQE | |
| | SGPGLVAPSQSLSVTCTVSGVSLPDYGVSWIRQPPRKGLEWLGVIWGSETTY | |
| | YNSALKSRLTIIKDNSKSQVFLKMNSLQTDDTAIYYCAKHYYYGGSYAMDY | |
| | WGQGTSVTVSSTTTPAPRPPTPAPTIASQPLSLRPEAFMYVAAAAFVLLFFVG | |
| | CGVLLSRKRRRMKLLSSIEQACDICRLKKLKCSKEKPKCAKCLKNNWECRYS | |
| | PKTKRSPLTRAHLTEVESRLERLEQLFLLIFPREDLDMILKMDSLQDIKALLTG | |
| | LFVQDNVNKDAVTDRLASVETDMPLTLRQHRISATSSSEESSNKGQRQLTVS | |
| | AAAGGSGGSGGSDALDDFDLDMLGSDALDDFDLDMLGSDALDDFDLDMLG | |
| | SDALDDFDLDMLGS | |
| 226 | MALPVTALLLPLALLLHAARPEQKLISEEDLDIQMTQTTSSLSASLGDRVTISC | pIZ362 |
| | RASQDISKYLNWYQQKPDGTVKLLIYHTSRLHSGVPSRFSGSGSGTDYSLTIS | 529 |
| | NLEQEDIATYFCQQGNTLPYTFGGGTKLEITGGGGSGGGGSGGGGSEVKLQE | |
| | SGPGLVAPSQSLSVTCTVSGVSLPDYGVSWIRQPPRKGLEWLGVIWGSETTY | |
| | YNSALKSRLTIIKDNSKSQVFLKMNSLQTDDTAIYYCAKHYYYGGSYAMDY | |
| | WGQGTSVTVSSRPAAGGAVHTRGLDFACDFMYVAAAAFVLLFFVGCGVLLS | |
| | RKRRRMKLLSSIEQACDICRLKKLKCSKEKPKCAKCLKNNWECRYSPKTKRS | |
| | PLTRAHLTEVESRLERLEQLFLLIFPREDLDMILKMDSLQDIKALLTGLFVQDN | |
| | VNKDAVTDRLASVETDMPLTLRQHRISATSSSEESSNKGQRQLTVSAAAGGS | |
| | GGSGGSDALDDFDLDMLGSDALDDFDLDMLGSDALDDFDLDMLGSDALDD | |
| | FDLDMLGS | |
| 227 | MALPVTALLLPLALLLHAARPEQKLISEEDLDIQMTQTTSSLSASLGDRVTISC | pIZ363 |
| | RASQDISKYLNWYQQKPDGTVKLLIYHTSRLHSGVPSRFSGSGSGTDYSLTIS | 530 |
| | NLEQEDIATYFCQQGNTLPYTFGGGTKLEITGGGGSGGGGSGGGGSEVKLQE | |
| | SGPGLVAPSQSLSVTCTVSGVSLPDYGVSWIRQPPRKGLEWLGVIWGSETTY | |
| | YNSALKSRLTIIKDNSKSQVFLKMNSLQTDDTAIYYCAKHYYYGGSYAMDY | |
| | WGQGTSVTVSSCRPAAGGAVHTRGLDFACDFMYVAAAAFVLLFFVGCGVL | |
| | LSRKRRRMKLLSSIEQACDICRLKKLKCSKEKPKCAKCLKNNWECRYSPKTK | |
| | RSPLTRAHLTEVESRLERLEQLFLLIFPREDLDMILKMDSLQDIKALLTGLFVQ | |
| | DNVNKDAVTDRLASVETDMPLTLRQHRISATSSSEESSNKGQRQLTVSAAAG | |
| | GSGGSGGSDALDDFDLDMLGSDALDDFDLDMLGSDALDDFDLDMLGSDAL | |
| | DDFDLDMLGS | |
| 228 | MALPVTALLLPLALLLHAARPEQKLISEEDLQVQLQQSGGGLVKPGGSLRLS | pIZ361FYIA |
| | CAASGFTFSSYAMHWVRQAPGKGLEWVAVISYDGSNKYYADSVKGRFTISR | 543 |
| | DNSKNTLYLQMDSLRAEDTAVYYCAKEGDSSRWSYDLWGRGTLVTVSSGG | |
| | GGSGGGGSGGGGSQSALTQPASVSGSPGQSITISCTGTSSDVGGYNYVSWYQ | |
| | QHPGKAPKVMIYDVTNRPSGVSNRFSGSKSGNTASLTISGLQAEDEADYYCS | |
| | SYTIASTLVVFGGGTKLTVLTTTPAPRPPTPAPTIASQPLSLRPEACFMYVAAA | |
| | AFVLLFFVGCGVLLSKRKRKHMKLLSSIEQACDICRLKKLKCSKEKPKCAKC | |
| | LKNNWECRYSPKTKRSPLTRAHLTEVESRLERLEQLFLLIFPREDLDMILKMD | |
| | SLQDIKALLTGLFVQDNVNKDAVTDRLASVETDMPLTLRQHRISATSSSEESS | |
| | NKGQRQLTVSAAAGGSGGSGGSDALDDFDLDMLGSDALDDFDLDMLGSDA | |
| | LDDFDLDMLGSDALDDFDLDMLGS | |
| 229 | MALPVTALLLPLALLLHAARPEQKLISEEDLQVQLVQSGAEVKKPGASVKVS | pIZ343BCMA |
| | CKASGYSFPDYYINWVRQAPGQGLEWMGWIYFASGNSEYNQKFTGRVTMT | 542 |
| | RDTSINTAYMELSSLTSEDTAVYFCASLYDYDWYFDVWGQGTMVTVSSGGG | |
| | GSGGGGSGGGGSDIVMTQTPLSLSVTPGQPASISCKSSQSLVHSNGNTYLHW | |
| | YLQKPGQSPQLLIYKVSNRFSGVPDRFSGSGSGTDFTLKISRVEAEDVGIYYCS | |
| | QSSIYPWTFGQGTKLEIKTTTPAPRPPTPAPTIASQPLSLRPEACFMYVAAAAF | |
| | VLLFFVGCGVLLSRKRRRMKLLSSIEQACDICRLKKLKCSKEKPKCAKCLKN | |
| | NWECRYSPKTKRSPLTRAHLTEVESRLERLEQLFLLIFPREDLDMILKMDSLQ | |
| | DIKALLTGLFVQDNVNKDAVTDRLASVETDMPLTLRQHRISATSSSEESSNKG | |
| | QRQLTVSAAAGGSGGSGGSDALDDFDLDMLGSDALDDFDLDMLGSDALDD | |
| | FDLDMLGSDALDDFDLDMLGS | |
| 230 | MALPVTALLLPLALLLHAARPEQKLISEEDLQVQLVQSGAEVKKPGASVKVS | pIZ361BCMA |
| | CKASGYSFPDYYINWVRQAPGQGLEWMGWIYFASGNSEYNQKFTGRVTMT | 543 |
| | RDTSINTAYMELSSLTSEDTAVYFCASLYDYDWYFDVWGQGTMVTVSSGGG | |
| | GSGGGGSGGGGSDIVMTQTPLSLSVTPGQPASISCKSSQSLVHSNGNTYLHW | |
| | YLQKPGQSPQLLIYKVSNRFSGVPDRFSGSGSGTDFTLKISRVEAEDVGIYYCS | |
| | QSSIYPWTFGQGTKLEIKTTTPAPRPPTPAPTIASQPLSLRPEACFMYVAAAAF | |
| | VLLFFVGCGVLLSKRKRKHMKLLSSIEQACDICRLKKLKCSKEKPKCAKCLK | |
| | NNWECRYSPKTKRSPLTRAHLTEVESRLERLEQLFLLIFPREDLDMILKMDSL | |
| | QDIKALLTGLFVQDNVNKDAVTDRLASVETDMPLTLRQHRISATSSSEESSNK | |
| | GQRQLTVSAAAGGSGGSGGSDALDDFDLDMLGSDALDDFDLDMLGSDALD | |
| | DFDLDMLGSDALDDFDLDMLGS | |
| 231 | MALPVTALLLPLALLLHAARPEQKLISEEDLDIQMTQSPSSLSASVGDRVTITC | pIZ343(4D5-8) |
| | RASQDVNTAVAWYQQKPGKAPKLLIYSASFLYSGVPSRFSGSRSGTDFTLTIS | 542 |
| | SLQPEDFATYYCQQHYTTPPTFGQGTKVEIKRTGSTSGSGKPGSGEGSEVQLV | |
| | ESGGGLVQPGGSLRLSCAASGFNIKDTYIHWVRQAPGKGLEWVARIYPTNGY | |
| | TRYADSVKGRFTISADTSKNTAYLQMNSLRAEDTAVYYCSRWGGDGFYAM | |
| | DVWGQGTLVTVSSGSTTTPAPRPPTPAPTIASQPLSLRPEACFMYVAAAAFVL | |
| | LFFVGCGVLLSRKRRRMKLLSSIEQACDICRLKKLKCSKEKPKCAKCLKNNW | |
| | ECRYSPKTKRSPLTRAHLTEVESRLERLEQLFLLIFPREDLDMILKMDSLQDIK | |
| | ALLTGLFVQDNVNKDAVTDRLASVETDMPLTLRQHRISATSSSEESSNKGQR | |
| | QLTVSAAAGGSGGSGGSDALDDFDLDMLGSDALDDFDLDMLGSDALDDFD | |
| | LDMLGSDALDDFDLDMLGS | |
| 232 | MALPVTALLLPLALLLHAARPEQKLISEEDLDIQMTQSPSSLSASVGDRVTITC | pIZ361(4D5-8) |
| | RASQDVNTAVAWYQQKPGKAPKLLIYSASFLYSGVPSRFSGSRSGTDFTLTIS | 543 |
| | SLQPEDFATYYCQQHYTTPPTFGQGTKVEIKRTGSTSGSGKPGSGEGSEVQLV | |
| | ESGGGLVQPGGSLRLSCAASGFNIKDTYIHWVRQAPGKGLEWVARIYPTNGY | |
| | TRYADSVKGRFTISADTSKNTAYLQMNSLRAEDTAVYYCSRWGGDGFYAM | |
| | DVWGQGTLVTVSSGSTTTPAPRPPTPAPTIASQPLSLRPEACFMYVAAAAFVL | |
| | LFFVGCGVLLSKRKRKHMKLLSSIEQACDICRLKKLKCSKEKPKCAKCLKNN | |
| | WECRYSPKTKRSPLTRAHLTEVESRLERLEQLFLLIFPREDLDMILKMDSLQDI | |
| | KALLTGLFVQDNVNKDAVTDRLASVETDMPLTLRQHRISATSSSEESSNKGQ | |
| | RQLTVSAAAGGSGGSGGSDALDDFDLDMLGSDALDDFDLDMLGSDALDDF | |
| | DLDMLGSDALDDFDLDMLGS | |
| 233 | MALPVTALLLPLALLLHAARPEQKLISEEDLDIQMTQSPSSLSASVGDRVTITC | pIZ343(4D5-7) |
| | RASQDVNTAVAWYQQKPGKAPKLLIYSASFLESGVPSRFSGSRSGTDFTLTIS | 542 |
| | SLQPEDFATYYCQQHYTTPPTFGQGTKVEIKRTGSTSGSGKPGSGEGSEVQLV | |
| | ESGGGLVQPGGSLRLSCAASGFNIKDTYIHWVRQAPGKGLEWVARIYPTNGY | |
| | TRYADSVKGRFTISADTSKNTAYLQMNSLRAEDTAVYYCSRWGGDGFYAM | |
| | DVWGQGTLVTVSSGSTTTPAPRPPTPAPTIASQPLSLRPEACFMYVAAAAFVL | |
| | LFFVGCGVLLSRKRRRMKLLSSIEQACDICRLKKLKCSKEKPKCAKCLKNNW | |
| | ECRYSPKTKRSPLTRAHLTEVESRLERLEQLFLLIFPREDLDMILKMDSLQDIK | |
| | ALLTGLFVQDNVNKDAVTDRLASVETDMPLTLRQHRISATSSSEESSNKGQR | |
| | QLTVSAAAGGSGGSGGSDALDDFDLDMLGSDALDDFDLDMLGSDALDDFD | |
| | LDMLGSDALDDFDLDMLGS | |
| 234 | MALPVTALLLPLALLLHAARPEQKLISEEDLDIQMTQSPSSLSASVGDRVTITC | pIZ361(4D5-7) |
| | RASQDVNTAVAWYQQKPGKAPKLLIYSASFLESGVPSRFSGSRSGTDFTLTIS | 543 |
| | SLQPEDFATYYCQQHYTTPPTFGQGTKVEIKRTGSTSGSGKPGSGEGSEVQLV | |
| | ESGGGLVQPGGSLRLSCAASGFNIKDTYIHWVRQAPGKGLEWVARIYPTNGY | |
| | TRYADSVKGRFTISADTSKNTAYLQMNSLRAEDTAVYYCSRWGGDGFYAM | |
| | DVWGQGTLVTVSSGSTTTPAPRPPTPAPTIASQPLSLRPEACFMYVAAAAFVL | |
| | LFFVGCGVLLSKRKRKHMKLLSSIEQACDICRLKKLKCSKEKPKCAKCLKNN | |
| | WECRYSPKTKRSPLTRAHLTEVESRLERLEQLFLLIFPREDLDMILKMDSLQDI | |
| | KALLTGLFVQDNVNKDAVTDRLASVETDMPLTLRQHRISATSSSEESSNKGQ | |
| | RQLTVSAAAGGSGGSGGSDALDDFDLDMLGSDALDDFDLDMLGSDALDDF | |
| | DLDMLGSDALDDFDLDMLGS | |
| 235 | MALPVTALLLPLALLLHAARPDYKDDDDKEVQLLESGGGLVQPGGSLRLSC | pRay068A |
| | AASGFTFSSYAMSWVRQAPGKGLEWVSSISGSGDYIYYADSVKGRFTISRDIS | 416 |
| | KNTLYLQMNSLRAEDTAVYYCAKEGTGANSSLADYRGQGTLVTVSSTTTPA | |
| | PRPPTPAPTIASQPLSLRPEACFMYVAAAAFVLLFFVGCGVLLSKRKRKHMKL | |
| | LSSIEQACDICRLKKLKCSKEKPKCAKCLKNNWECRYSPKTKRSPLTRAHLTE | |
| | VESRLERLEQLFLLIFPREDLDMILKMDSLQDIKALLTGLFVQDNVNKDAVTD | |
| | RLASVETDMPLTLRQHRISATSSSEESSNKGQRQLTVSAAAGGSGGSGGSDA | |
| | LDDFDLDMLGSDALDDFDLDMLGSDALDDFDLDMLGSDALDDFDLDMLGS | |
| 236 | MALPVTALLLPLALLLHAARPDYKDDDDKEVQLLESGGGLVQPGGSLRLSC | pRay068B |
| | AASGFTFSSYAMSWVRQAPGKGLEWVSSISGSGDYIYYADSVKGRFTISRDIS | 426 |
| | KNTLYLQMNSLRAEDTAVYYCAKEGTGANSSLADYRGQGTLVTVSSFVPVF | |
| | LPAKPTTTPAPRPPTPAPTIASQPLSLRPEACFMYVAAAAFVLLFFVGCGVLLS | |
| | KRKRKHMKLLSSIEQACDICRLKKLKCSKEKPKCAKCLKNNWECRYSPKTK | |
| | RSPLTRAHLTEVESRLERLEQLFLLIFPREDLDMILKMDSLQDIKALLTGLFVQ | |
| | DNVNKDAVTDRLASVETDMPLTLRQHRISATSSSEESSNKGQRQLTVSAAAG | |
| | GSGGSGGSDALDDFDLDMLGSDALDDFDLDMLGSDALDDFDLDMLGSDAL | |
| | DDFDLDMLGS | |
| 237 | MALPVTALLLPLALLLHAARPEQKLISEEDLDIQMTQTTSSLSASLGDRVTISC | pIZ370 |
| | RASQDISKYLNWYQQKPDGTVKLLIYHTSRLHSGVPSRFSGSGSGTDYSLTIS | 543 |
| | NLEQEDIATYFCQQGNTLPYTFGGGTKLEITGGGGSGGGGSGGGGSEVKLQE | |
| | SGPGLVAPSQSLSVTCTVSGVSLPDYGVSWIRQPPRKGLEWLGVIWGSETTY | |
| | YNSALKSRLTIIKDNSKSQVFLKMNSLQTDDTAIYYCAKHYYYGGSYAMDY | |
| | WGQGTSVTVSSTTTPAPRPPTPAPTIASQPLSLRPEACATVVIVVCVSFLVFMII | |
| | LGVFRIRAAHRRTMRMKLLSSIEQACDICRLKKLKCSKEKPKCAKCLKNNWE | |
| | CRYSPKTKRSPLTRAHLTEVESRLERLEQLFLLIFPREDLDMILKMDSLQDIKA | |
| | LLTGLFVQDNVNKDAVTDRLASVETDMPLTLRQHRISATSSSEESSNKGQRQ | |
| | LTVSAAAGGSGGSGGSDALDDFDLDMLGSDALDDFDLDMLGSDALDDFDL | |
| | DMLGSDALDDFDLDMLGS | |
| 238 | MALPVTALLLPLALLLHAARPEQKLISEEDLDIQMTQTTSSLSASLGDRVTISC | pIZ371 |
| | RASQDISKYLNWYQQKPDGTVKLLIYHTSRLHSGVPSRFSGSGSGTDYSLTIS | 541 |
| | NLEQEDIATYFCQQGNTLPYTFGGGTKLEITGGGGSGGGGSGGGGSEVKLQE | |
| | SGPGLVAPSQSLSVTCTVSGVSLPDYGVSWIRQPPRKGLEWLGVIWGSETTY | |
| | YNSALKSRLTIIKDNSKSQVFLKMNSLQTDDTAIYYCAKHYYYGGSYAMDY | |
| | WGQGTSVTVSSTTTPAPRPPTPAPTIASQPLSLRPEACIATVVIIISVCMLVFVV | |
| | AMGVYRVRIAHQHMKLLSSIEQACDICRLKKLKCSKEKPKCAKCLKNNWEC | |
| | RYSPKTKRSPLTRAHLTEVESRLERLEQLFLLIFPREDLDMILKMDSLQDIKAL | |
| | LTGLFVQDNVNKDAVTDRLASVETDMPLTLRQHRISATSSSEESSNKGQRQL | |
| | TVSAAAGGSGGSGGSDALDDFDLDMLGSDALDDFDLDMLGSDALDDFDLD | |
| | MLGSDALDDFDLDMLGS | |
| 239 | MALPVTALLLPLALLLHAARPEQKLISEEDLDIQMTQTTSSLSASLGDRVTISC | pTMD201 |
| | RASQDISKYLNWYQQKPDGTVKLLIYHTSRLHSGVPSRFSGSGSGTDYSLTIS | 537 |
| | NLEQEDIATYFCQQGNTLPYTFGGGTKLEITGGGGSGGGGSGGGGSEVKLQE | |
| | SGPGLVAPSQSLSVTCTVSGVSLPDYGVSWIRQPPRKGLEWLGVIWGSETTY | |
| | YNSALKSRLTIIKDNSKSQVFLKMNSLQTDDTAIYYCAKHYYYGGSYAMDY | |
| | WGQGTSVTVSSTTTPAPRPPTPAPTIASQPLSLRPEACATVVIVVCVSFLVFMII | |
| | LGVFRKRRRMKLLSSIEQACDICRLKKLKCSKEKPKCAKCLKNNWECRYSPK | |
| | TKRSPLTRAHLTEVESRLERLEQLFLLIFPREDLDMILKMDSLQDIKALLTGLF | |
| | VQDNVNKDAVTDRLASVETDMPLTLRQHRISATSSSEESSNKGQRQLTVSAA | |
| | AGGSGGSGGSDALDDFDLDMLGSDALDDFDLDMLGSDALDDFDLDMLGSD | |
| | ALDDFDLDMLGS | |
| 240 | MALPVTALLLPLALLLHAARPEQKLISEEDLDIQMTQTTSSLSASLGDRVTISC | pTMD202 |
| | RASQDISKYLNWYQQKPDGTVKLLIYHTSRLHSGVPSRFSGSGSGTDYSLTIS | 538 |
| | NLEQEDIATYFCQQGNTLPYTFGGGTKLEITGGGGSGGGGSGGGGSEVKLQE | |
| | SGPGLVAPSQSLSVTCTVSGVSLPDYGVSWIRQPPRKGLEWLGVIWGSETTY | |
| | YNSALKSRLTIIKDNSKSQVFLKMNSLQTDDTAIYYCAKHYYYGGSYAMDY | |
| | WGQGTSVTVSSTTTPAPRPPTPAPTIASQPLSLRPEACIATVVIIISVCMLVFVV | |
| | AMGVYRKRRRMKLLSSIEQACDICRLKKLKCSKEKPKCAKCLKNNWECRYS | |
| | PKTKRSPLTRAHLTEVESRLERLEQLFLLIFPREDLDMILKMDSLQDIKALLTG | |
| | LFVQDNVNKDAVTDRLASVETDMPLTLRQHRISATSSSEESSNKGQRQLTVS | |
| | AAAGGSGGSGGSDALDDFDLDMLGSDALDDFDLDMLGSDALDDFDLDMLG | |
| | SDALDDFDLDMLGS | |
| 241 | ATVVIVVCVSFLVFMIILGVF | TMD Domain |
| | | of SEQ ID |
| | | NOS: 237 and |
| | | 239 |
| 242 | IATVVIIISVCMLVFVVAMGVY | TMD Domain |
| | | of SEQ ID |
| | | NOS: 238 and |
| | | 240 |

### REFERENCES

[0220] D.L. Porter et al., N Engl J Med (2011) 365(8): 725-33.
[0221] L. Morsut et al., Cell (2016) 164(4): 780-91.
[0222] M.F. Naso et al., BioDrugs (2017) 31(4):317-34.
[0223] M. Nasri et al., Cytotechnology (2014) 66(6):1031-38.
[0224] K.T. Roybal et al., Cell (2016) 167(2):419-32.
[0225] Samulski et al., Annu Rev Virol (2014) 1:427.
[0226] Sakuma et al., Biochem J (2012) 443:603.
[0227] D.J. Watson et al., “Viral vectors for gene therapy: methods and protocols” 2003 (Totowa, NJ, USA: Humana Press); pp. 383-404.

The application's sequence listing, which the Patent Office published only in electronic form, follows.

SEQUENCE LISTING (242 sequences)

SEQ ID NO: 1 - protein, 819 aa, Artificial sequence
  Synthetic construct
MALPVTALLLPLALLLHAARPEQKLISEEDLDIQMTQTTSSLSASLGDRVTISCRASQDISKYLNWYQQKPDGTVKLLIYHTSRLHSGVPSRFSGSGSGTDYSLTISNLEQEDIATYFCQQGNTLPYTFGGGTKLEITGGGGSGGGGSGGGGSEVKLQESGPGLVAPSQSLSVTCTVSGVSLPDYGVSWIRQPPRKGLEWLGVIWGSETTYYNSALKSRLTIIKDNSKSQVFLKMNSLQTDDTAIYYCAKHYYYGGSYAMDYWGQGTSVTVSSILDYSFGGGAGRDIPPPLIEEACELPECQEDAGNKVCSLQCNNHACGWDGGDCSLNFNDPWKNCTQSLQCWKYFSDGHCDSQCNSAGCLFDGFDCQRAEGQCNPLYDQYCKDHFSDGHCDQGCNSAECEWDGLDCAEHVPERLAAGTLVVVVLMPPEQLRNSSFHFLRELSRVLHTNVVFKRDAHGQQMIFPYYGREEELRKHPIKRAAEGWAAPDALLGQVKASLLPGGSEGGRRRRELDPMDVRGSIVYLEIDNRQCVQASSQCFQSATDVAAFLGALASLGSLNIPYKIEAVQSETVEPPPPAQLHFMYVAAAAFVLLFFVGCGVLLSRRKKMKLLSSIEQACDICRLKKLKCSKEKPKCAKCLKNNWECRYSPKTKRSPLTRAHLTEVESRLERLEQLFLLIFPREDLDMILKMDSLQDIKALLTGLFVQDNVNKDAVTDRLASVETDMPLTLRQHRISATSSSEESSNKGQRQLTVSAAAGGSGGSGGSDALDDFDLDMLGSDALDDFDLDMLGSDALDDFDLDMLGSDALDDFDLDMLGS

SEQ ID NO: 2 - protein, 818 aa, Artificial sequence
  Synthetic construct
MALPVTALLLPLALLLHAARPEQKLISEEDLDIQMTQTTSSLSASLGDRVTISCRASQDISKYLNWYQQKPDGTVKLLIYHTSRLHSGVPSRFSGSGSGTDYSLTISNLEQEDIATYFCQQGNTLPYTFGGGTKLEITGGGGSGGGGSGGGGSEVKLQESGPGLVAPSQSLSVTCTVSGVSLPDYGVSWIRQPPRKGLEWLGVIWGSETTYYNSALKSRLTIIKDNSKSQVFLKMNSLQTDDTAIYYCAKHYYYGGSYAMDYWGQGTSVTVSSILDYSFGGGAGRDIPPPLIEEACELPECQEDAGNKVCSLQCNNHACGWDGGDCSLNFNDPWKNCTQSLQCWKYFSDGHCDSQCNSAGCLFDGFDCQRAEGQCNPLYDQYCKDHFSDGHCDQGCNSAECEWDGLDCAEHVPERLAAGTLVVVVLMPPEQLRNSSFHFLRELSRVLHTNVVFKRDAHGQQMIFPYYGREEELRKHPIKRAAEGWAAPDALLGQVKASLLPGGSEGGRRRRELDPMDVRGSIVYLEIDNRQCVQASSQCFQSATDVAAFLGALASLGSLNIPYKIEAVQSETVEPPPPAQLHFMYVAAAAFVLLFFVGCGVLLSRKRMKLLSSIEQACDICRLKKLKCSKEKPKCAKCLKNNWECRYSPKTKRSPLTRAHLTEVESRLERLEQLFLLIFPREDLDMILKMDSLQDIKALLTGLFVQDNVNKDAVTDRLASVETDMPLTLRQHRISATSSSEESSNKGQRQLTVSAAAGGSGGSGGSDALDDFDLDMLGSDALDDFDLDMLGSDALDDFDLDMLGSDALDDFDLDMLGS

SEQ ID NO: 3 - protein, 818 aa, Artificial sequence
  Synthetic construct
MALPVTALLLPLALLLHAARPEQKLISEEDLDIQMTQTTSSLSASLGDRVTISCRASQDISKYLNWYQQKPDGTVKLLIYHTSRLHSGVPSRFSGSGSGTDYSLTISNLEQEDIATYFCQQGNTLPYTFGGGTKLEITGGGGSGGGGSGGGGSEVKLQESGPGLVAPSQSLSVTCTVSGVSLPDYGVSWIRQPPRKGLEWLGVIWGSETTYYNSALKSRLTIIKDNSKSQVFLKMNSLQTDDTAIYYCAKHYYYGGSYAMDYWGQGTSVTVSSILDYSFGGGAGRDIPPPLIEEACELPECQEDAGNKVCSLQCNNHACGWDGGDCSLNFNDPWKNCTQSLQCWKYFSDGHCDSQCNSAGCLFDGFDCQRAEGQCNPLYDQYCKDHFSDGHCDQGCNSAECEWDGLDCAEHVPERLAAGTLVVVVLMPPEQLRNSSFHFLRELSRVLHTNVVFKRDAHGQQMIFPYYGREEELRKHPIKRAAEGWAAPDALLGQVKASLLPGGSEGGRRRRELDPMDVRGSIVYLEIDNRQCVQASSQCFQSATDVAAFLGALASLGSLNIPYKIEAVQSETVEPPPPAQLHFMYVAAAAFVLLFFVGCGVLLSKKKMKLLSSIEQACDICRLKKLKCSKEKPKCAKCLKNNWECRYSPKTKRSPLTRAHLTEVESRLERLEQLFLLIFPREDLDMILKMDSLQDIKALLTGLFVQDNVNKDAVTDRLASVETDMPLTLRQHRISATSSSEESSNKGQRQLTVSAAAGGSGGSGGSDALDDFDLDMLGSDALDDFDLDMLGSDALDDFDLDMLGSDALDDFDLDMLGS

SEQ ID NO: 4 - protein, 816 aa, Artificial sequence
  Synthetic construct
MALPVTALLLPLALLLHAARPEQKLISEEDLDIQMTQTTSSLSASLGDRVTISCRASQDISKYLNWYQQKPDGTVKLLIYHTSRLHSGVPSRFSGSGSGTDYSLTISNLEQEDIATYFCQQGNTLPYTFGGGTKLEITGGGGSGGGGSGGGGSEVKLQESGPGLVAPSQSLSVTCTVSGVSLPDYGVSWIRQPPRKGLEWLGVIWGSETTYYNSALKSRLTIIKDNSKSQVFLKMNSLQTDDTAIYYCAKHYYYGGSYAMDYWGQGTSVTVSSILDYSFGGGAGRDIPPPLIEEACELPECQEDAGNKVCSLQCNNHACGWDGGDCSLNFNDPWKNCTQSLQCWKYFSDGHCDSQCNSAGCLFDGFDCQRAEGQCNPLYDQYCKDHFSDGHCDQGCNSAECEWDGLDCAEHVPERLAAGTLVVVVLMPPEQLRNSSFHFLRELSRVLHTNVVFKRDAHGQQMIFPYYGREEELRKHPIKRAAEGWAAPDALLGQVKASLLPGGSEGGRRRRELDPMDVRGSIVYLEIDNRQCVQASSQCFQSATDVAAFLGALASLGSLNIPYKIEAVQSETVEPPPPAQLHFMYVAAAAFVLLFFVGCGVLLSHMKLLSSIEQACDICRLKKLKCSKEKPKCAKCLKNNWECRYSPKTKRSPLTRAHLTEVESRLERLEQLFLLIFPREDLDMILKMDSLQDIKALLTGLFVQDNVNKDAVTDRLASVETDMPLTLRQHRISATSSSEESSNKGQRQLTVSAAAGGSGGSGGSDALDDFDLDMLGSDALDDFDLDMLGSDALDDFDLDMLGSDALDDFDLDMLGS

SEQ ID NO: 5 - protein, 822 aa, Artificial sequence
  Synthetic construct
MALPVTALLLPLALLLHAARPEQKLISEEDLDIQMTQTTSSLSASLGDRVTISCRASQDISKYLNWYQQKPDGTVKLLIYHTSRLHSGVPSRFSGSGSGTDYSLTISNLEQEDIATYFCQQGNTLPYTFGGGTKLEITGGGGSGGGGSGGGGSEVKLQESGPGLVAPSQSLSVTCTVSGVSLPDYGVSWIRQPPRKGLEWLGVIWGSETTYYNSALKSRLTIIKDNSKSQVFLKMNSLQTDDTAIYYCAKHYYYGGSYAMDYWGQGTSVTVSSILDYSFGGGAGRDIPPPLIEEACELPECQEDAGNKVCSLQCNNHACGWDGGDCSLNFNDPWKNCTQSLQCWKYFSDGHCDSQCNSAGCLFDGFDCQRAEGQCNPLYDQYCKDHFSDGHCDQGCNSAECEWDGLDCAEHVPERLAAGTLVVVVLMPPEQLRNSSFHFLRELSRVLHTNVVFKRDAHGQQMIFPYYGREEELRKHPIKRAAEGWAAPDALLGQVKASLLPGGSEGGRRRRELDPMDVRGSIVYLEIDNRQCVQASSQCFQSATDVAAFLGALASLGSLNIPYKIEAVQSETVEPPPPAQLHFMYVAAAAFVLLFFVGCGVLLSKYKQKPKMKLLSSIEQACDICRLKKLKCSKEKPKCAKCLKNNWECRYSPKTKRSPLTRAHLTEVESRLERLEQLFLLIFPREDLDMILKMDSLQDIKALLTGLFVQDNVNKDAVTDRLASVETDMPLTLRQHRISATSSSEESSNKGQRQLTVSAAAGGSGGSGGSDALDDFDLDMLGSDALDDFDLDMLGSDALDDFDLDMLGSDALDDFDLDMLGS

SEQ ID NO: 6 - protein, 819 aa, Artificial sequence
  Synthetic construct
MALPVTALLLPLALLLHAARPEQKLISEEDLDIQMTQTTSSLSASLGDRVTISCRASQDISKYLNWYQQKPDGTVKLLIYHTSRLHSGVPSRFSGSGSGTDYSLTISNLEQEDIATYFCQQGNTLPYTFGGGTKLEITGGGGSGGGGSGGGGSEVKLQESGPGLVAPSQSLSVTCTVSGVSLPDYGVSWIRQPPRKGLEWLGVIWGSETTYYNSALKSRLTIIKDNSKSQVFLKMNSLQTDDTAIYYCAKHYYYGGSYAMDYWGQGTSVTVSSILDYSFGGGAGRDIPPPLIEEACELPECQEDAGNKVCSLQCNNHACGWDGGDCSLNFNDPWKNCTQSLQCWKYFSDGHCDSQCNSAGCLFDGFDCQRAEGQCNPLYDQYCKDHFSDGHCDQGCNSAECEWDGLDCAEHVPERLAAGTLVVVVLMPPEQLRNSSFHFLRELSRVLHTNVVFKRDAHGQQMIFPYYGREEELRKHPIKRAAEGWAAPDALLGQVKASLLPGGSEGGRRRRELDPMDVRGSIVYLEIDNRQCVQASSQCFQSATDVAAFLGALASLGSLNIPYKIEAVQSETVEPPPPAQLHFMYVAAAAFVLLFFVGCGVLLSKRRRMKLLSSIEQACDICRLKKLKCSKEKPKCAKCLKNNWECRYSPKTKRSPLTRAHLTEVESRLERLEQLFLLIFPREDLDMILKMDSLQDIKALLTGLFVQDNVNKDAVTDRLASVETDMPLTLRQHRISATSSSEESSNKGQRQLTVSAAAGGSGGSGGSDALDDFDLDMLGSDALDDFDLDMLGSDALDDFDLDMLGSDALDDFDLDMLGS

SEQ ID NO: 7 - protein, 817 aa, Artificial sequence
  Synthetic construct
MALPVTALLLPLALLLHAARPEQKLISEEDLDIQMTQTTSSLSASLGDRVTISCRASQDISKYLNWYQQKPDGTVKLLIYHTSRLHSGVPSRFSGSGSGTDYSLTISNLEQEDIATYFCQQGNTLPYTFGGGTKLEITGGGGSGGGGSGGGGSEVKLQESGPGLVAPSQSLSVTCTVSGVSLPDYGVSWIRQPPRKGLEWLGVIWGSETTYYNSALKSRLTIIKDNSKSQVFLKMNSLQTDDTAIYYCAKHYYYGGSYAMDYWGQGTSVTVSSILDYSFGGGAGRDIPPPLIEEACELPECQEDAGNKVCSLQCNNHACGWDGGDCSLNFNDPWKNCTQSLQCWKYFSDGHCDSQCNSAGCLFDGFDCQRAEGQCNPLYDQYCKDHFSDGHCDQGCNSAECEWDGLDCAEHVPERLAAGTLVVVVLMPPEQLRNSSFHFLRELSRVLHTNVVFKRDAHGQQMIFPYYGREEELRKHPIKRAAEGWAAPDALLGQVKASLLPGGSEGGRRRRELDPMDVRGSIVYLEIDNRQCVQASSQCFQSATDVAAFLGALASLGSLNIPYKIEAVQSETVEPPPPAQLHFMYVAAAAFVLLFFVGCGVLLSRKMKLLSSIEQACDICRLKKLKCSKEKPKCAKCLKNNWECRYSPKTKRSPLTRAHLTEVESRLERLEQLFLLIFPREDLDMILKMDSLQDIKALLTGLFVQDNVNKDAVTDRLASVETDMPLTLRQHRISATSSSEESSNKGQRQLTVSAAAGGSGGSGGSDALDDFDLDMLGSDALDDFDLDMLGSDALDDFDLDMLGSDALDDFDLDMLGS

SEQ ID NO: 8 - protein, 822 aa, Artificial sequence
  Synthetic construct
MALPVTALLLPLALLLHAARPEQKLISEEDLDIQMTQTTSSLSASLGDRVTISCRASQDISKYLNWYQQKPDGTVKLLIYHTSRLHSGVPSRFSGSGSGTDYSLTISNLEQEDIATYFCQQGNTLPYTFGGGTKLEITGGGGSGGGGSGGGGSEVKLQESGPGLVAPSQSLSVTCTVSGVSLPDYGVSWIRQPPRKGLEWLGVIWGSETTYYNSALKSRLTIIKDNSKSQVFLKMNSLQTDDTAIYYCAKHYYYGGSYAMDYWGQGTSVTVSSILDYSFGGGAGRDIPPPLIEEACELPECQEDAGNKVCSLQCNNHACGWDGGDCSLNFNDPWKNCTQSLQCWKYFSDGHCDSQCNSAGCLFDGFDCQRAEGQCNPLYDQYCKDHFSDGHCDQGCNSAECEWDGLDCAEHVPERLAAGTLVVVVLMPPEQLRNSSFHFLRELSRVLHTNVVFKRDAHGQQMIFPYYGREEELRKHPIKRAAEGWAAPDALLGQVKASLLPGGSEGGRRRRELDPMDVRGSIVYLEIDNRQCVQASSQCFQSATDVAAFLGALASLGSLNIPYKIEAVQSETVEPPPPAQLHFMYVAAAAFVLLFFVGCGVLLSRKKRKGKMKLLSSIEQACDICRLKKLKCSKEKPKCAKCLKNNWECRYSPKTKRSPLTRAHLTEVESRLERLEQLFLLIFPREDLDMILKMDSLQDIKALLTGLFVQDNVNKDAVTDRLASVETDMPLTLRQHRISATSSSEESSNKGQRQLTVSAAAGGSGGSGGSDALDDFDLDMLGSDALDDFDLDMLGSDALDDFDLDMLGSDALDDFDLDMLGS

SEQ ID NO: 9 - protein, 817 aa, Artificial sequence
  Synthetic construct
MALPVTALLLPLALLLHAARPEQKLISEEDLDIQMTQTTSSLSASLGDRVTISCRASQDISKYLNWYQQKPDGTVKLLIYHTSRLHSGVPSRFSGSGSGTDYSLTISNLEQEDIATYFCQQGNTLPYTFGGGTKLEITGGGGSGGGGSGGGGSEVKLQESGPGLVAPSQSLSVTCTVSGVSLPDYGVSWIRQPPRKGLEWLGVIWGSETTYYNSALKSRLTIIKDNSKSQVFLKMNSLQTDDTAIYYCAKHYYYGGSYAMDYWGQGTSVTVSSILDYSFGGGAGRDIPPPLIEEACELPECQEDAGNKVCSLQCNNHACGWDGGDCSLNFNDPWKNCTQSLQCWKYFSDGHCDSQCNSAGCLFDGFDCQRAEGQCNPLYDQYCKDHFSDGHCDQGCNSAECEWDGLDCAEHVPERLAAGTLVVVVLMPPEQLRNSSFHFLRELSRVLHTNVVFKRDAHGQQMIFPYYGREEELRKHPIKRAAEGWAAPDALLGQVKASLLPGGSEGGRRRRELDPMDVRGSIVYLEIDNRQCVQASSQCFQSATDVAAFLGALASLGSLNIPYKIEAVQSETVEPPPPAQLHFMYVAAAAFVLLFFVGCGVLLSRRMKLLSSIEQACDICRLKKLKCSKEKPKCAKCLKNNWECRYSPKTKRSPLTRAHLTEVESRLERLEQLFLLIFPREDLDMILKMDSLQDIKALLTGLFVQDNVNKDAVTDRLASVETDMPLTLRQHRISATSSSEESSNKGQRQLTVSAAAGGSGGSGGSDALDDFDLDMLGSDALDDFDLDMLGSDALDDFDLDMLGSDALDDFDLDMLGS

SEQ ID NO: 10 - protein, 819 aa, Artificial sequence
  Synthetic construct
MALPVTALLLPLALLLHAARPEQKLISEEDLDIQMTQTTSSLSASLGDRVTISCRASQDISKYLNWYQQKPDGTVKLLIYHTSRLHSGVPSRFSGSGSGTDYSLTISNLEQEDIATYFCQQGNTLPYTFGGGTKLEITGGGGSGGGGSGGGGSEVKLQESGPGLVAPSQSLSVTCTVSGVSLPDYGVSWIRQPPRKGLEWLGVIWGSETTYYNSALKSRLTIIKDNSKSQVFLKMNSLQTDDTAIYYCAKHYYYGGSYAMDYWGQGTSVTVSSILDYSFGGGAGRDIPPPLIEEACELPECQEDAGNKVCSLQCNNHACGWDGGDCSLNFNDPWKNCTQSLQCWKYFSDGHCDSQCNSAGCLFDGFDCQRAEGQCNPLYDQYCKDHFSDGHCDQGCNSAECEWDGLDCAEHVPERLAAGTLVVVVLMPPEQLRNSSFHFLRELSRVLHTNVVFKRDAHGQQMIFPYYGREEELRKHPIKRAAEGWAAPDALLGQVKASLLPGGSEGGRRRRELDPMDVRGSIVYLEIDNRQCVQASSQCFQSATDVAAFLGALASLGSLNIPYKIEAVQSETVEPPPPAQLHFMYVAAAAFVLLFFVGCGVLLSRISRMKLLSSIEQACDICRLKKLKCSKEKPKCAKCLKNNWECRYSPKTKRSPLTRAHLTEVESRLERLEQLFLLIFPREDLDMILKMDSLQDIKALLTGLFVQDNVNKDAVTDRLASVETDMPLTLRQHRISATSSSEESSNKGQRQLTVSAAAGGSGGSGGSDALDDFDLDMLGSDALDDFDLDMLGSDALDDFDLDMLGSDALDDFDLDMLGS

SEQ ID NO: 11 - protein, 822 aa, Artificial sequence
  Synthetic construct
MALPVTALLLPLALLLHAARPEQKLISEEDLDIQMTQTTSSLSASLGDRVTISCRASQDISKYLNWYQQKPDGTVKLLIYHTSRLHSGVPSRFSGSGSGTDYSLTISNLEQEDIATYFCQQGNTLPYTFGGGTKLEITGGGGSGGGGSGGGGSEVKLQESGPGLVAPSQSLSVTCTVSGVSLPDYGVSWIRQPPRKGLEWLGVIWGSETTYYNSALKSRLTIIKDNSKSQVFLKMNSLQTDDTAIYYCAKHYYYGGSYAMDYWGQGTSVTVSSILDYSFGGGAGRDIPPPLIEEACELPECQEDAGNKVCSLQCNNHACGWDGGDCSLNFNDPWKNCTQSLQCWKYFSDGHCDSQCNSAGCLFDGFDCQRAEGQCNPLYDQYCKDHFSDGHCDQGCNSAECEWDGLDCAEHVPERLAAGTLVVVVLMPPEQLRNSSFHFLRELSRVLHTNVVFKRDAHGQQMIFPYYGREEELRKHPIKRAAEGWAAPDALLGQVKASLLPGGSEGGRRRRELDPMDVRGSIVYLEIDNRQCVQASSQCFQSATDVAAFLGALASLGSLNIPYKIEAVQSETVEPPPPAQLHFMYVAAAAFVLLFFVGCGVLLSKCGKGAKMKLLSSIEQACDICRLKKLKCSKEKPKCAKCLKNNWECRYSPKTKRSPLTRAHLTEVESRLERLEQLFLLIFPREDLDMILKMDSLQDIKALLTGLFVQDNVNKDAVTDRLASVETDMPLTLRQHRISATSSSEESSNKGQRQLTVSAAAGGSGGSGGSDALDDFDLDMLGSDALDDFDLDMLGSDALDDFDLDMLGSDALDDFDLDMLGS

SEQ ID NO: 12 - protein, 818 aa, Artificial sequence
  Synthetic construct
MALPVTALLLPLALLLHAARPEQKLISEEDLDIQMTQTTSSLSASLGDRVTISCRASQDISKYLNWYQQKPDGTVKLLIYHTSRLHSGVPSRFSGSGSGTDYSLTISNLEQEDIATYFCQQGNTLPYTFGGGTKLEITGGGGSGGGGSGGGGSEVKLQESGPGLVAPSQSLSVTCTVSGVSLPDYGVSWIRQPPRKGLEWLGVIWGSETTYYNSALKSRLTIIKDNSKSQVFLKMNSLQTDDTAIYYCAKHYYYGGSYAMDYWGQGTSVTVSSILDYSFGGGAGRDIPPPLIEEACELPECQEDAGNKVCSLQCNNHACGWDGGDCSLNFNDPWKNCTQSLQCWKYFSDGHCDSQCNSAGCLFDGFDCQRAEGQCNPLYDQYCKDHFSDGHCDQGCNSAECEWDGLDCAEHVPERLAAGTLVVVVLMPPEQLRNSSFHFLRELSRVLHTNVVFKRDAHGQQMIFPYYGREEELRKHPIKRAAEGWAAPDALLGQVKASLLPGGSEGGRRRRELDPMDVRGSIVYLEIDNRQCVQASSQCFQSATDVAAFLGALASLGSLNIPYKIEAVQSETVEPPPPAQLHFMYVAAAAFVLLFFVGCGVLLSRRRMKLLSSIEQACDICRLKKLKCSKEKPKCAKCLKNNWECRYSPKTKRSPLTRAHLTEVESRLERLEQLFLLIFPREDLDMILKMDSLQDIKALLTGLFVQDNVNKDAVTDRLASVETDMPLTLRQHRISATSSSEESSNKGQRQLTVSAAAGGSGGSGGSDALDDFDLDMLGSDALDDFDLDMLGSDALDDFDLDMLGSDALDDFDLDMLGS

SEQ ID NO: 13 - protein, 821 aa, Artificial sequence
  Synthetic construct
MALPVTALLLPLALLLHAARPEQKLISEEDLDIQMTQTTSSLSASLGDRVTISCRASQDISKYLNWYQQKPDGTVKLLIYHTSRLHSGVPSRFSGSGSGTDYSLTISNLEQEDIATYFCQQGNTLPYTFGGGTKLEITGGGGSGGGGSGGGGSEVKLQESGPGLVAPSQSLSVTCTVSGVSLPDYGVSWIRQPPRKGLEWLGVIWGSETTYYNSALKSRLTIIKDNSKSQVFLKMNSLQTDDTAIYYCAKHYYYGGSYAMDYWGQGTSVTVSSILDYSFGGGAGRDIPPPLIEEACELPECQEDAGNKVCSLQCNNHACGWDGGDCSLNFNDPWKNCTQSLQCWKYFSDGHCDSQCNSAGCLFDGFDCQRAEGQCNPLYDQYCKDHFSDGHCDQGCNSAECEWDGLDCAEHVPERLAAGTLVVVVLMPPEQLRNSSFHFLRELSRVLHTNVVFKRDAHGQQMIFPYYGREEELRKHPIKRAAEGWAAPDALLGQVKASLLPGGSEGGRRRRELDPMDVRGSIVYLEIDNRQCVQASSQCFQSATDVAAFLGALASLGSLNIPYKIEAVQSETVEPPPPAQLHFMYVAAAAFVLLFFVGCGVLLSKQQRIKMKLLSSIEQACDICRLKKLKCSKEKPKCAKCLKNNWECRYSPKTKRSPLTRAHLTEVESRLERLEQLFLLIFPREDLDMILKMDSLQDIKALLTGLFVQDNVNKDAVTDRLASVETDMPLTLRQHRISATSSSEESSNKGQRQLTVSAAAGGSGGSGGSDALDDFDLDMLGSDALDDFDLDMLGSDALDDFDLDMLGSDALDDFDLDMLGS

SEQ ID NO: 14 - protein, 818 aa, Artificial sequence
  Synthetic construct
MALPVTALLLPLALLLHAARPEQKLISEEDLDIQMTQTTSSLSASLGDRVTISCRASQDISKYLNWYQQKPDGTVKLLIYHTSRLHSGVPSRFSGSGSGTDYSLTISNLEQEDIATYFCQQGNTLPYTFGGGTKLEITGGGGSGGGGSGGGGSEVKLQESGPGLVAPSQSLSVTCTVSGVSLPDYGVSWIRQPPRKGLEWLGVIWGSETTYYNSALKSRLTIIKDNSKSQVFLKMNSLQTDDTAIYYCAKHYYYGGSYAMDYWGQGTSVTVSSILDYSFGGGAGRDIPPPLIEEACELPECQEDAGNKVCSLQCNNHACGWDGGDCSLNFNDPWKNCTQSLQCWKYFSDGHCDSQCNSAGCLFDGFDCQRAEGQCNPLYDQYCKDHFSDGHCDQGCNSAECEWDGLDCAEHVPERLAAGTLVVVVLMPPEQLRNSSFHFLRELSRVLHTNVVFKRDAHGQQMIFPYYGREEELRKHPIKRAAEGWAAPDALLGQVKASLLPGGSEGGRRRRELDPMDVRGSIVYLEIDNRQCVQASSQCFQSATDVAAFLGALASLGSLNIPYKIEAVQSETVEPPPPAQLHFMYVAAAAFVLLFFVGCGVLLSRRKMKLLSSIEQACDICRLKKLKCSKEKPKCAKCLKNNWECRYSPKTKRSPLTRAHLTEVESRLERLEQLFLLIFPREDLDMILKMDSLQDIKALLTGLFVQDNVNKDAVTDRLASVETDMPLTLRQHRISATSSSEESSNKGQRQLTVSAAAGGSGGSGGSDALDDFDLDMLGSDALDDFDLDMLGSDALDDFDLDMLGSDALDDFDLDMLGS

SEQ ID NO: 15 - protein, 816 aa, Artificial sequence
  Synthetic construct
MALPVTALLLPLALLLHAARPEQKLISEEDLDIQMTQTTSSLSASLGDRVTISCRASQDISKYLNWYQQKPDGTVKLLIYHTSRLHSGVPSRFSGSGSGTDYSLTISNLEQEDIATYFCQQGNTLPYTFGGGTKLEITGGGGSGGGGSGGGGSEVKLQESGPGLVAPSQSLSVTCTVSGVSLPDYGVSWIRQPPRKGLEWLGVIWGSETTYYNSALKSRLTIIKDNSKSQVFLKMNSLQTDDTAIYYCAKHYYYGGSYAMDYWGQGTSVTVSSILDYSFGGGAGRDIPPPLIEEACELPECQEDAGNKVCSLQCNNHACGWDGGDCSLNFNDPWKNCTQSLQCWKYFSDGHCDSQCNSAGCLFDGFDCQRAEGQCNPLYDQYCKDHFSDGHCDQGCNSAECEWDGLDCAEHVPERLAAGTLVVVVLMPPEQLRNSSFHFLRELSRVLHTNVVFKRDAHGQQMIFPYYGREEELRKHPIKRAAEGWAAPDALLGQVKASLLPGGSEGGRRRRELDPMDVRGSIVYLEIDNRQCVQASSQCFQSATDVAAFLGALASLGSLNIPYKIEAVQSETVEPPPPAQLHFMYVAAAAFVLLFFVGCGVLLSKMKLLSSIEQACDICRLKKLKCSKEKPKCAKCLKNNWECRYSPKTKRSPLTRAHLTEVESRLERLEQLFLLIFPREDLDMILKMDSLQDIKALLTGLFVQDNVNKDAVTDRLASVETDMPLTLRQHRISATSSSEESSNKGQRQLTVSAAAGGSGGSGGSDALDDFDLDMLGSDALDDFDLDMLGSDALDDFDLDMLGSDALDDFDLDMLGS

SEQ ID NO: 16 - protein, 819 aa, Artificial sequence
  Synthetic construct
MALPVTALLLPLALLLHAARPEQKLISEEDLDIQMTQTTSSLSASLGDRVTISCRASQDISKYLNWYQQKPDGTVKLLIYHTSRLHSGVPSRFSGSGSGTDYSLTISNLEQEDIATYFCQQGNTLPYTFGGGTKLEITGGGGSGGGGSGGGGSEVKLQESGPGLVAPSQSLSVTCTVSGVSLPDYGVSWIRQPPRKGLEWLGVIWGSETTYYNSALKSRLTIIKDNSKSQVFLKMNSLQTDDTAIYYCAKHYYYGGSYAMDYWGQGTSVTVSSILDYSFGGGAGRDIPPPLIEEACELPECQEDAGNKVCSLQCNNHACGWDGGDCSLNFNDPWKNCTQSLQCWKYFSDGHCDSQCNSAGCLFDGFDCQRAEGQCNPLYDQYCKDHFSDGHCDQGCNSAECEWDGLDCAEHVPERLAAGTLVVVVLMPPEQLRNSSFHFLRELSRVLHTNVVFKRDAHGQQMIFPYYGREEELRKHPIKRAAEGWAAPDALLGQVKASLLPGGSEGGRRRRELDPMDVRGSIVYLEIDNRQCVQASSQCFQSATDVAAFLGALASLGSLNIPYKIEAVQSETVEPPPPAQLHFMYVAAAAFVLLFFVGCGVLLSHRKRMKLLSSIEQACDICRLKKLKCSKEKPKCAKCLKNNWECRYSPKTKRSPLTRAHLTEVESRLERLEQLFLLIFPREDLDMILKMDSLQDIKALLTGLFVQDNVNKDAVTDRLASVETDMPLTLRQHRISATSSSEESSNKGQRQLTVSAAAGGSGGSGGSDALDDFDLDMLGSDALDDFDLDMLGSDALDDFDLDMLGSDALDDFDLDMLGS

SEQ ID NO: 17 - protein, 819 aa, Artificial sequence
  Synthetic construct
MALPVTALLLPLALLLHAARPEQKLISEEDLDIQMTQTTSSLSASLGDRVTISCRASQDISKYLNWYQQKPDGTVKLLIYHTSRLHSGVPSRFSGSGSGTDYSLTISNLEQEDIATYFCQQGNTLPYTFGGGTKLEITGGGGSGGGGSGGGGSEVKLQESGPGLVAPSQSLSVTCTVSGVSLPDYGVSWIRQPPRKGLEWLGVIWGSETTYYNSALKSRLTIIKDNSKSQVFLKMNSLQTDDTAIYYCAKHYYYGGSYAMDYWGQGTSVTVSSILDYSFGGGAGRDIPPPLIEEACELPECQEDAGNKVCSLQCNNHACGWDGGDCSLNFNDPWKNCTQSLQCWKYFSDGHCDSQCNSAGCLFDGFDCQRAEGQCNPLYDQYCKDHFSDGHCDQGCNSAECEWDGLDCAEHVPERLAAGTLVVVVLMPPEQLRNSSFHFLRELSRVLHTNVVFKRDAHGQQMIFPYYGREEELRKHPIKRAAEGWAAPDALLGQVKASLLPGGSEGGRRRRELDPMDVRGSIVYLEIDNRQCVQASSQCFQSATDVAAFLGALASLGSLNIPYKIEAVQSETVEPPPPAQLHFMYVAAAAFVLLFFVGCGVLLSKIFKMKLLSSIEQACDICRLKKLKCSKEKPKCAKCLKNNWECRYSPKTKRSPLTRAHLTEVESRLERLEQLFLLIFPREDLDMILKMDSLQDIKALLTGLFVQDNVNKDAVTDRLASVETDMPLTLRQHRISATSSSEESSNKGQRQLTVSAAAGGSGGSGGSDALDDFDLDMLGSDALDDFDLDMLGSDALDDFDLDMLGSDALDDFDLDMLGS

SEQ ID NO: 18 - protein, 816 aa, Artificial sequence
  Synthetic construct
MALPVTALLLPLALLLHAARPEQKLISEEDLDIQMTQTTSSLSASLGDRVTISCRASQDISKYLNWYQQKPDGTVKLLIYHTSRLHSGVPSRFSGSGSGTDYSLTISNLEQEDIATYFCQQGNTLPYTFGGGTKLEITGGGGSGGGGSGGGGSEVKLQESGPGLVAPSQSLSVTCTVSGVSLPDYGVSWIRQPPRKGLEWLGVIWGSETTYYNSALKSRLTIIKDNSKSQVFLKMNSLQTDDTAIYYCAKHYYYGGSYAMDYWGQGTSVTVSSILDYSFGGGAGRDIPPPLIEEACELPECQEDAGNKVCSLQCNNHACGWDGGDCSLNFNDPWKNCTQSLQCWKYFSDGHCDSQCNSAGCLFDGFDCQRAEGQCNPLYDQYCKDHFSDGHCDQGCNSAECEWDGLDCAEHVPERLAAGTLVVVVLMPPEQLRNSSFHFLRELSRVLHTNVVFKRDAHGQQMIFPYYGREEELRKHPIKRAAEGWAAPDALLGQVKASLLPGGSEGGRRRRELDPMDVRGSIVYLEIDNRQCVQASSQCFQSATDVAAFLGALASLGSLNIPYKIEAVQSETVEPPPPAQLHFMYVAAAAFVLLFFVGCGVLLSRMKLLSSIEQACDICRLKKLKCSKEKPKCAKCLKNNWECRYSPKTKRSPLTRAHLTEVESRLERLEQLFLLIFPREDLDMILKMDSLQDIKALLTGLFVQDNVNKDAVTDRLASVETDMPLTLRQHRISATSSSEESSNKGQRQLTVSAAAGGSGGSGGSDALDDFDLDMLGSDALDDFDLDMLGSDALDDFDLDMLGSDALDDFDLDMLGS

SEQ ID NO: 19 - protein, 822 aa, Artificial sequence
  Synthetic construct
MALPVTALLLPLALLLHAARPEQKLISEEDLDIQMTQTTSSLSASLGDRVTISCRASQDISKYLNWYQQKPDGTVKLLIYHTSRLHSGVPSRFSGSGSGTDYSLTISNLEQEDIATYFCQQGNTLPYTFGGGTKLEITGGGGSGGGGSGGGGSEVKLQESGPGLVAPSQSLSVTCTVSGVSLPDYGVSWIRQPPRKGLEWLGVIWGSETTYYNSALKSRLTIIKDNSKSQVFLKMNSLQTDDTAIYYCAKHYYYGGSYAMDYWGQGTSVTVSSILDYSFGGGAGRDIPPPLIEEACELPECQEDAGNKVCSLQCNNHACGWDGGDCSLNFNDPWKNCTQSLQCWKYFSDGHCDSQCNSAGCLFDGFDCQRAEGQCNPLYDQYCKDHFSDGHCDQGCNSAECEWDGLDCAEHVPERLAAGTLVVVVLMPPEQLRNSSFHFLRELSRVLHTNVVFKRDAHGQQMIFPYYGREEELRKHPIKRAAEGWAAPDALLGQVKASLLPGGSEGGRRRRELDPMDVRGSIVYLEIDNRQCVQASSQCFQSATDVAAFLGALASLGSLNIPYKIEAVQSETVEPPPPAQLHFMYVAAAAFVLLFFVGCGVLLSRSKKLEHMKLLSSIEQACDICRLKKLKCSKEKPKCAKCLKNNWECRYSPKTKRSPLTRAHLTEVESRLERLEQLFLLIFPREDLDMILKMDSLQDIKALLTGLFVQDNVNKDAVTDRLASVETDMPLTLRQHRISATSSSEESSNKGQRQLTVSAAAGGSGGSGGSDALDDFDLDMLGSDALDDFDLDMLGSDALDDFDLDMLGSDALDDFDLDMLGS

SEQ ID NO: 20 - protein, 822 aa, Artificial sequence
  Synthetic construct
MALPVTALLLPLALLLHAARPEQKLISEEDLDIQMTQTTSSLSASLGDRVTISCRASQDISKYLNWYQQKPDGTVKLLIYHTSRLHSGVPSRFSGSGSGTDYSLTISNLEQEDIATYFCQQGNTLPYTFGGGTKLEITGGGGSGGGGSGGGGSEVKLQESGPGLVAPSQSLSVTCTVSGVSLPDYGVSWIRQPPRKGLEWLGVIWGSETTYYNSALKSRLTIIKDNSKSQVFLKMNSLQTDDTAIYYCAKHYYYGGSYAMDYWGQGTSVTVSSILDYSFGGGAGRDIPPPLIEEACELPECQEDAGNKVCSLQCNNHACGWDGGDCSLNFNDPWKNCTQSLQCWKYFSDGHCDSQCNSAGCLFDGFDCQRAEGQCNPLYDQYCKDHFSDGHCDQGCNSAECEWDGLDCAEHVPERLAAGTLVVVVLMPPEQLRNSSFHFLRELSRVLHTNVVFKRDAHGQQMIFPYYGREEELRKHPIKRAAEGWAAPDALLGQVKASLLPGGSEGGRRRRELDPMDVRGSIVYLEIDNRQCVQASSQCFQSATDVAAFLGALASLGSLNIPYKIEAVQSETVEPPPPAQLHFMYVAAAAFVLLFFVGCGVLLSKSKRREHMKLLSSIEQACDICRLKKLKCSKEKPKCAKCLKNNWECRYSPKTKRSPLTRAHLTEVESRLERLEQLFLLIFPREDLDMILKMDSLQDIKALLTGLFVQDNVNKDAVTDRLASVETDMPLTLRQHRISATSSSEESSNKGQRQLTVSAAAGGSGGSGGSDALDDFDLDMLGSDALDDFDLDMLGSDALDDFDLDMLGSDALDDFDLDMLGS

SEQ ID NO: 21 - protein, 822 aa, Artificial sequence
  Synthetic construct
MALPVTALLLPLALLLHAARPEQKLISEEDLDIQMTQTTSSLSASLGDRVTISCRASQDISKYLNWYQQKPDGTVKLLIYHTSRLHSGVPSRFSGSGSGTDYSLTISNLEQEDIATYFCQQGNTLPYTFGGGTKLEITGGGGSGGGGSGGGGSEVKLQESGPGLVAPSQSLSVTCTVSGVSLPDYGVSWIRQPPRKGLEWLGVIWGSETTYYNSALKSRLTIIKDNSKSQVFLKMNSLQTDDTAIYYCAKHYYYGGSYAMDYWGQGTSVTVSSILDYSFGGGAGRDIPPPLIEEACELPECQEDAGNKVCSLQCNNHACGWDGGDCSLNFNDPWKNCTQSLQCWKYFSDGHCDSQCNSAGCLFDGFDCQRAEGQCNPLYDQYCKDHFSDGHCDQGCNSAECEWDGLDCAEHVPERLAAGTLVVVVLMPPEQLRNSSFHFLRELSRVLHTNVVFKRDAHGQQMIFPYYGREEELRKHPIKRAAEGWAAPDALLGQVKASLLPGGSEGGRRRRELDPMDVRGSIVYLEIDNRQCVQASSQCFQSATDVAAFLGALASLGSLNIPYKIEAVQSETVEPPPPAQLHFMYVAAAAFVLLFFVGCGVLLSKRNRGGKMKLLSSIEQACDICRLKKLKCSKEKPKCAKCLKNNWECRYSPKTKRSPLTRAHLTEVESRLERLEQLFLLIFPREDLDMILKMDSLQDIKALLTGLFVQDNVNKDAVTDRLASVETDMPLTLRQHRISATSSSEESSNKGQRQLTVSAAAGGSGGSGGSDALDDFDLDMLGSDALDDFDLDMLGSDALDDFDLDMLGSDALDDFDLDMLGS

SEQ ID NO: 22 - protein, 818 aa, Artificial sequence
  Synthetic construct
MALPVTALLLPLALLLHAARPEQKLISEEDLDIQMTQTTSSLSASLGDRVTISCRASQDISKYLNWYQQKPDGTVKLLIYHTSRLHSGVPSRFSGSGSGTDYSLTISNLEQEDIATYFCQQGNTLPYTFGGGTKLEITGGGGSGGGGSGGGGSEVKLQESGPGLVAPSQSLSVTCTVSGVSLPDYGVSWIRQPPRKGLEWLGVIWGSETTYYNSALKSRLTIIKDNSKSQVFLKMNSLQTDDTAIYYCAKHYYYGGSYAMDYWGQGTSVTVSSILDYSFGGGAGRDIPPPLIEEACELPECQEDAGNKVCSLQCNNHACGWDGGDCSLNFNDPWKNCTQSLQCWKYFSDGHCDSQCNSAGCLFDGFDCQRAEGQCNPLYDQYCKDHFSDGHCDQGCNSAECEWDGLDCAEHVPERLAAGTLVVVVLMPPEQLRNSSFHFLRELSRVLHTNVVFKRDAHGQQMIFPYYGREEELRKHPIKRAAEGWAAPDALLGQVKASLLPGGSEGGRRRRELDPMDVRGSIVYLEIDNRQCVQASSQCFQSATDVAAFLGALASLGSLNIPYKIEAVQSETVEPPPPAQLHFMYVAAAAFVLLFFVGCGVLLSKRRMKLLSSIEQACDICRLKKLKCSKEKPKCAKCLKNNWECRYSPKTKRSPLTRAHLTEVESRLERLEQLFLLIFPREDLDMILKMDSLQDIKALLTGLFVQDNVNKDAVTDRLASVETDMPLTLRQHRISATSSSEESSNKGQRQLTVSAAAGGSGGSGGSDALDDFDLDMLGSDALDDFDLDMLGSDALDDFDLDMLGSDALDDFDLDMLGS

SEQ ID NO: 23 - protein, 819 aa, Artificial sequence
  Synthetic construct
MALPVTALLLPLALLLHAARPEQKLISEEDLDIQMTQTTSSLSASLGDRVTISCRASQDISKYLNWYQQKPDGTVKLLIYHTSRLHSGVPSRFSGSGSGTDYSLTISNLEQEDIATYFCQQGNTLPYTFGGGTKLEITGGGGSGGGGSGGGGSEVKLQESGPGLVAPSQSLSVTCTVSGVSLPDYGVSWIRQPPRKGLEWLGVIWGSETTYYNSALKSRLTIIKDNSKSQVFLKMNSLQTDDTAIYYCAKHYYYGGSYAMDYWGQGTSVTVSSILDYSFGGGAGRDIPPPLIEEACELPECQEDAGNKVCSLQCNNHACGWDGGDCSLNFNDPWKNCTQSLQCWKYFSDGHCDSQCNSAGCLFDGFDCQRAEGQCNPLYDQYCKDHFSDGHCDQGCNSAECEWDGLDCAEHVPERLAAGTLVVVVLMPPEQLRNSSFHFLRELSRVLHTNVVFKRDAHGQQMIFPYYGREEELRKHPIKRAAEGWAAPDALLGQVKASLLPGGSEGGRRRRELDPMDVRGSIVYLEIDNRQCVQASSQCFQSATDVAAFLGALASLGSLNIPYKIEAVQSETVEPPPPAQLHFMYVAAAAFVLLFFVGCGVLLSHYRRMKLLSSIEQACDICRLKKLKCSKEKPKCAKCLKNNWECRYSPKTKRSPLTRAHLTEVESRLERLEQLFLLIFPREDLDMILKMDSLQDIKALLTGLFVQDNVNKDAVTDRLASVETDMPLTLRQHRISATSSSEESSNKGQRQLTVSAAAGGSGGSGGSDALDDFDLDMLGSDALDDFDLDMLGSDALDDFDLDMLGSDALDDFDLDMLGS

SEQ ID NO: 24 - protein, 821 aa, Artificial sequence
  Synthetic construct
MALPVTALLLPLALLLHAARPEQKLISEEDLDIQMTQTTSSLSASLGDRVTISCRASQDISKYLNWYQQKPDGTVKLLIYHTSRLHSGVPSRFSGSGSGTDYSLTISNLEQEDIATYFCQQGNTLPYTFGGGTKLEITGGGGSGGGGSGGGGSEVKLQESGPGLVAPSQSLSVTCTVSGVSLPDYGVSWIRQPPRKGLEWLGVIWGSETTYYNSALKSRLTIIKDNSKSQVFLKMNSLQTDDTAIYYCAKHYYYGGSYAMDYWGQGTSVTVSSILDYSFGGGAGRDIPPPLIEEACELPECQEDAGNKVCSLQCNNHACGWDGGDCSLNFNDPWKNCTQSLQCWKYFSDGHCDSQCNSAGCLFDGFDCQRAEGQCNPLYDQYCKDHFSDGHCDQGCNSAECEWDGLDCAEHVPERLAAGTLVVVVLMPPEQLRNSSFHFLRELSRVLHTNVVFKRDAHGQQMIFPYYGREEELRKHPIKRAAEGWAAPDALLGQVKASLLPGGSEGGRRRRELDPMDVRGSIVYLEIDNRQCVQASSQCFQSATDVAAFLGALASLGSLNIPYKIEAVQSETVEPPPPAQLHFMYVAAAAFVLLFFVGCGVLLSKRKRTHMKLLSSIEQACDICRLKKLKCSKEKPKCAKCLKNNWECRYSPKTKRSPLTRAHLTEVESRLERLEQLFLLIFPREDLDMILKMDSLQDIKALLTGLFVQDNVNKDAVTDRLASVETDMPLTLRQHRISATSSSEESSNKGQRQLTVSAAAGGSGGSGGSDALDDFDLDMLGSDALDDFDLDMLGSDALDDFDLDMLGSDALDDFDLDMLGS

SEQ ID NO: 25 - protein, 817 aa, Artificial sequence
  Synthetic construct
MALPVTALLLPLALLLHAARPEQKLISEEDLDIQMTQTTSSLSASLGDRVTISCRASQDISKYLNWYQQKPDGTVKLLIYHTSRLHSGVPSRFSGSGSGTDYSLTISNLEQEDIATYFCQQGNTLPYTFGGGTKLEITGGGGSGGGGSGGGGSEVKLQESGPGLVAPSQSLSVTCTVSGVSLPDYGVSWIRQPPRKGLEWLGVIWGSETTYYNSALKSRLTIIKDNSKSQVFLKMNSLQTDDTAIYYCAKHYYYGGSYAMDYWGQGTSVTVSSILDYSFGGGAGRDIPPPLIEEACELPECQEDAGNKVCSLQCNNHACGWDGGDCSLNFNDPWKNCTQSLQCWKYFSDGHCDSQCNSAGCLFDGFDCQRAEGQCNPLYDQYCKDHFSDGHCDQGCNSAECEWDGLDCAEHVPERLAAGTLVVVVLMPPEQLRNSSFHFLRELSRVLHTNVVFKRDAHGQQMIFPYYGREEELRKHPIKRAAEGWAAPDALLGQVKASLLPGGSEGGRRRRELDPMDVRGSIVYLEIDNRQCVQASSQCFQSATDVAAFLGALASLGSLNIPYKIEAVQSETVEPPPPAQLHFMYVAAAAFVLLFFVGCGVLLSKKMKLLSSIEQACDICRLKKLKCSKEKPKCAKCLKNNWECRYSPKTKRSPLTRAHLTEVESRLERLEQLFLLIFPREDLDMILKMDSLQDIKALLTGLFVQDNVNKDAVTDRLASVETDMPLTLRQHRISATSSSEESSNKGQRQLTVSAAAGGSGGSGGSDALDDFDLDMLGSDALDDFDLDMLGSDALDDFDLDMLGSDALDDFDLDMLGS

SEQ ID NO: 26 - protein, 820 aa, Artificial sequence
  Synthetic construct
MALPVTALLLPLALLLHAARPEQKLISEEDLDIQMTQTTSSLSASLGDRVTISCRASQDISKYLNWYQQKPDGTVKLLIYHTSRLHSGVPSRFSGSGSGTDYSLTISNLEQEDIATYFCQQGNTLPYTFGGGTKLEITGGGGSGGGGSGGGGSEVKLQESGPGLVAPSQSLSVTCTVSGVSLPDYGVSWIRQPPRKGLEWLGVIWGSETTYYNSALKSRLTIIKDNSKSQVFLKMNSLQTDDTAIYYCAKHYYYGGSYAMDYWGQGTSVTVSSILDYSFGGGAGRDIPPPLIEEACELPECQEDAGNKVCSLQCNNHACGWDGGDCSLNFNDPWKNCTQSLQCWKYFSDGHCDSQCNSAGCLFDGFDCQRAEGQCNPLYDQYCKDHFSDGHCDQGCNSAECEWDGLDCAEHVPERLAAGTLVVVVLMPPEQLRNSSFHFLRELSRVLHTNVVFKRDAHGQQMIFPYYGREEELRKHPIKRAAEGWAAPDALLGQVKASLLPGGSEGGRRRRELDPMDVRGSIVYLEIDNRQCVQASSQCFQSATDVAAFLGALASLGSLNIPYKIEAVQSETVEPPPPAQLHFMYVAAAAFVLLFFVGCGVLLSRKVSKMKLLSSIEQACDICRLKKLKCSKEKPKCAKCLKNNWECRYSPKTKRSPLTRAHLTEVESRLERLEQLFLLIFPREDLDMILKMDSLQDIKALLTGLFVQDNVNKDAVTDRLASVETDMPLTLRQHRISATSSSEESSNKGQRQLTVSAAAGGSGGSGGSDALDDFDLDMLGSDALDDFDLDMLGSDALDDFDLDMLGSDALDDFDLDMLGS

SEQ ID NO: 27 - protein, 820 aa, Artificial sequence
  Synthetic construct
MALPVTALLLPLALLLHAARPEQKLISEEDLDIQMTQTTSSLSASLGDRVTISCRASQDISKYLNWYQQKPDGTVKLLIYHTSRLHSGVPSRFSGSGSGTDYSLTISNLEQEDIATYFCQQGNTLPYTFGGGTKLEITGGGGSGGGGSGGGGSEVKLQESGPGLVAPSQSLSVTCTVSGVSLPDYGVSWIRQPPRKGLEWLGVIWGSETTYYNSALKSRLTIIKDNSKSQVFLKMNSLQTDDTAIYYCAKHYYYGGSYAMDYWGQGTSVTVSSILDYSFGGGAGRDIPPPLIEEACELPECQEDAGNKVCSLQCNNHACGWDGGDCSLNFNDPWKNCTQSLQCWKYFSDGHCDSQCNSAGCLFDGFDCQRAEGQCNPLYDQYCKDHFSDGHCDQGCNSAECEWDGLDCAEHVPERLAAGTLVVVVLMPPEQLRNSSFHFLRELSRVLHTNVVFKRDAHGQQMIFPYYGREEELRKHPIKRAAEGWAAPDALLGQVKASLLPGGSEGGRRRRELDPMDVRGSIVYLEIDNRQCVQASSQCFQSATDVAAFLGALASLGSLNIPYKIEAVQSETVEPPPPAQLHFMYVAAAAFVLLFFVGCGVLLSRKKYRMKLLSSIEQACDICRLKKLKCSKEKPKCAKCLKNNWECRYSPKTKRSPLTRAHLTEVESRLERLEQLFLLIFPREDLDMILKMDSLQDIKALLTGLFVQDNVNKDAVTDRLASVETDMPLTLRQHRISATSSSEESSNKGQRQLTVSAAAGGSGGSGGSDALDDFDLDMLGSDALDDFDLDMLGSDALDDFDLDMLGSDALDDFDLDMLGS

SEQ ID NO: 28 - protein, 817 aa, Artificial sequence
  Synthetic construct
MALPVTALLLPLALLLHAARPEQKLISEEDLDIQMTQTTSSLSASLGDRVTISCRASQDISKYLNWYQQKPDGTVKLLIYHTSRLHSGVPSRFSGSGSGTDYSLTISNLEQEDIATYFCQQGNTLPYTFGGGTKLEITGGGGSGGGGSGGGGSEVKLQESGPGLVAPSQSLSVTCTVSGVSLPDYGVSWIRQPPRKGLEWLGVIWGSETTYYNSALKSRLTIIKDNSKSQVFLKMNSLQTDDTAIYYCAKHYYYGGSYAMDYWGQGTSVTVSSILDYSFGGGAGRDIPPPLIEEACELPECQEDAGNKVCSLQCNNHACGWDGGDCSLNFNDPWKNCTQSLQCWKYFSDGHCDSQCNSAGCLFDGFDCQRAEGQCNPLYDQYCKDHFSDGHCDQGCNSAECEWDGLDCAEHVPERLAAGTLVVVVLMPPEQLRNSSFHFLRELSRVLHTNVVFKRDAHGQQMIFPYYGREEELRKHPIKRAAEGWAAPDALLGQVKASLLPGGSEGGRRRRELDPMDVRGSIVYLEIDNRQCVQASSQCFQSATDVAAFLGALASLGSLNIPYKIEAVQSETVEPPPPAQLHFMYVAAAAFVLLFFVGCGVLLSKRMKLLSSIEQACDICRLKKLKCSKEKPKCAKCLKNNWECRYSPKTKRSPLTRAHLTEVESRLERLEQLFLLIFPREDLDMILKMDSLQDIKALLTGLFVQDNVNKDAVTDRLASVETDMPLTLRQHRISATSSSEESSNKGQRQLTVSAAAGGSGGSGGSDALDDFDLDMLGSDALDDFDLDMLGSDALDDFDLDMLGSDALDDFDLDMLGS

SEQ ID NO: 29 - protein, 817 aa, Artificial sequence
  Synthetic construct
MALPVTALLLPLALLLHAARPEQKLISEEDLDIQMTQTTSSLSASLGDRVTISCRASQDISKYLNWYQQKPDGTVKLLIYHTSRLHSGVPSRFSGSGSGTDYSLTISNLEQEDIATYFCQQGNTLPYTFGGGTKLEITGGGGSGGGGSGGGGSEVKLQESGPGLVAPSQSLSVTCTVSGVSLPDYGVSWIRQPPRKGLEWLGVIWGSETTYYNSALKSRLTIIKDNSKSQVFLKMNSLQTDDTAIYYCAKHYYYGGSYAMDYWGQGTSVTVSSILDYSFGGGAGRDIPPPLIEEACELPECQEDAGNKVCSLQCNNHACGWDGGDCSLNFNDPWKNCTQSLQCWKYFSDGHCDSQCNSAGCLFDGFDCQRAEGQCNPLYDQYCKDHFSDGHCDQGCNSAECEWDGLDCAEHVPERLAAGTLVVVVLMPPEQLRNSSFHFLRELSRVLHTNVVFKRDAHGQQMIFPYYGREEELRKHPIKRAAEGWAAPDALLGQVKASLLPGGSEGGRRRRELDPMDVRGSIVYLEIDNRQCVQASSQCFQSATDVAAFLGALASLGSLNIPYKIEAVQSETVEPPPPAQLHFMYVAAAAFVLLFFVGCGVLLSHHMKLLSSIEQACDICRLKKLKCSKEKPKCAKCLKNNWECRYSPKTKRSPLTRAHLTEVESRLERLEQLFLLIFPREDLDMILKMDSLQDIKALLTGLFVQDNVNKDAVTDRLASVETDMPLTLRQHRISATSSSEESSNKGQRQLTVSAAAGGSGGSGGSDALDDFDLDMLGSDALDDFDLDMLGSDALDDFDLDMLGSDALDDFDLDMLGS

SEQ ID NO: 30 - protein, 821 aa, Artificial sequence
  Synthetic construct
MALPVTALLLPLALLLHAARPEQKLISEEDLDIQMTQTTSSLSASLGDRVTISCRASQDISKYLNWYQQKPDGTVKLLIYHTSRLHSGVPSRFSGSGSGTDYSLTISNLEQEDIATYFCQQGNTLPYTFGGGTKLEITGGGGSGGGGSGGGGSEVKLQESGPGLVAPSQSLSVTCTVSGVSLPDYGVSWIRQPPRKGLEWLGVIWGSETTYYNSALKSRLTIIKDNSKSQVFLKMNSLQTDDTAIYYCAKHYYYGGSYAMDYWGQGTSVTVSSILDYSFGGGAGRDIPPPLIEEACELPECQEDAGNKVCSLQCNNHACGWDGGDCSLNFNDPWKNCTQSLQCWKYFSDGHCDSQCNSAGCLFDGFDCQRAEGQCNPLYDQYCKDHFSDGHCDQGCNSAECEWDGLDCAEHVPERLAAGTLVVVVLMPPEQLRNSSFHFLRELSRVLHTNVVFKRDAHGQQMIFPYYGREEELRKHPIKRAAEGWAAPDALLGQVKASLLPGGSEGGRRRRELDPMDVRGSIVYLEIDNRQCVQASSQCFQSATDVAAFLGALASLGSLNIPYKIEAVQSETVEPPPPAQLHFMYVAAAAFVLLFFVGCGVLLSRWKKSRMKLLSSIEQACDICRLKKLKCSKEKPKCAKCLKNNWECRYSPKTKRSPLTRAHLTEVESRLERLEQLFLLIFPREDLDMILKMDSLQDIKALLTGLFVQDNVNKDAVTDRLASVETDMPLTLRQHRISATSSSEESSNKGQRQLTVSAAAGGSGGSGGSDALDDFDLDMLGSDALDDFDLDMLGSDALDDFDLDMLGSDALDDFDLDMLGS

SEQ ID NO: 31 - protein, 820 aa, Artificial sequence
  Synthetic construct
MALPVTALLLPLALLLHAARPEQKLISEEDLDIQMTQTTSSLSASLGDRVTISCRASQDISKYLNWYQQKPDGTVKLLIYHTSRLHSGVPSRFSGSGSGTDYSLTISNLEQEDIATYFCQQGNTLPYTFGGGTKLEITGGGGSGGGGSGGGGSEVKLQESGPGLVAPSQSLSVTCTVSGVSLPDYGVSWIRQPPRKGLEWLGVIWGSETTYYNSALKSRLTIIKDNSKSQVFLKMNSLQTDDTAIYYCAKHYYYGGSYAMDYWGQGTSVTVSSILDYSFGGGAGRDIPPPLIEEACELPECQEDAGNKVCSLQCNNHACGWDGGDCSLNFNDPWKNCTQSLQCWKYFSDGHCDSQCNSAGCLFDGFDCQRAEGQCNPLYDQYCKDHFSDGHCDQGCNSAECEWDGLDCAEHVPERLAAGTLVVVVLMPPEQLRNSSFHFLRELSRVLHTNVVFKRDAHGQQMIFPYYGREEELRKHPIKRAAEGWAAPDALLGQVKASLLPGGSEGGRRRRELDPMDVRGSIVYLEIDNRQCVQASSQCFQSATDVAAFLGALASLGSLNIPYKIEAVQSETVEPPPPAQLHFMYVAAAAFVLLFFVGCGVLLSRRQRRMKLLSSIEQACDICRLKKLKCSKEKPKCAKCLKNNWECRYSPKTKRSPLTRAHLTEVESRLERLEQLFLLIFPREDLDMILKMDSLQDIKALLTGLFVQDNVNKDAVTDRLASVETDMPLTLRQHRISATSSSEESSNKGQRQLTVSAAAGGSGGSGGSDALDDFDLDMLGSDALDDFDLDMLGSDALDDFDLDMLGSDALDDFDLDMLGS

SEQ ID NO: 32 - protein, 821 aa, Artificial sequence
  Synthetic construct
MALPVTALLLPLALLLHAARPEQKLISEEDLDIQMTQTTSSLSASLGDRVTISCRASQDISKYLNWYQQKPDGTVKLLIYHTSRLHSGVPSRFSGSGSGTDYSLTISNLEQEDIATYFCQQGNTLPYTFGGGTKLEITGGGGSGGGGSGGGGSEVKLQESGPGLVAPSQSLSVTCTVSGVSLPDYGVSWIRQPPRKGLEWLGVIWGSETTYYNSALKSRLTIIKDNSKSQVFLKMNSLQTDDTAIYYCAKHYYYGGSYAMDYWGQGTSVTVSSILDYSFGGGAGRDIPPPLIEEACELPECQEDAGNKVCSLQCNNHACGWDGGDCSLNFNDPWKNCTQSLQCWKYFSDGHCDSQCNSAGCLFDGFDCQRAEGQCNPLYDQYCKDHFSDGHCDQGCNSAECEWDGLDCAEHVPERLAAGTLVVVVLMPPEQLRNSSFHFLRELSRVLHTNVVFKRDAHGQQMIFPYYGREEELRKHPIKRAAEGWAAPDALLGQVKASLLPGGSEGGRRRRELDPMDVRGSIVYLEIDNRQCVQASSQCFQSATDVAAFLGALASLGSLNIPYKIEAVQSETVEPPPPAQLHFMYVAAAAFVLLFFVGCGVLLSRHRKKRMKLLSSIEQACDICRLKKLKCSKEKPKCAKCLKNNWECRYSPKTKRSPLTRAHLTEVESRLERLEQLFLLIFPREDLDMILKMDSLQDIKALLTGLFVQDNVNKDAVTDRLASVETDMPLTLRQHRISATSSSEESSNKGQRQLTVSAAAGGSGGSGGSDALDDFDLDMLGSDALDDFDLDMLGSDALDDFDLDMLGSDALDDFDLDMLGS

SEQ ID NO: 33 - protein, 818 aa, Artificial sequence
  Synthetic construct
MALPVTALLLPLALLLHAARPEQKLISEEDLDIQMTQTTSSLSASLGDRVTISCRASQDISKYLNWYQQKPDGTVKLLIYHTSRLHSGVPSRFSGSGSGTDYSLTISNLEQEDIATYFCQQGNTLPYTFGGGTKLEITGGGGSGGGGSGGGGSEVKLQESGPGLVAPSQSLSVTCTVSGVSLPDYGVSWIRQPPRKGLEWLGVIWGSETTYYNSALKSRLTIIKDNSKSQVFLKMNSLQTDDTAIYYCAKHYYYGGSYAMDYWGQGTSVTVSSILDYSFGGGAGRDIPPPLIEEACELPECQEDAGNKVCSLQCNNHACGWDGGDCSLNFNDPWKNCTQSLQCWKYFSDGHCDSQCNSAGCLFDGFDCQRAEGQCNPLYDQYCKDHFSDGHCDQGCNSAECEWDGLDCAEHVPERLAAGTLVVVVLMPPEQLRNSSFHFLRELSRVLHTNVVFKRDAHGQQMIFPYYGREEELRKHPIKRAAEGWAAPDALLGQVKASLLPGGSEGGRRRRELDPMDVRGSIVYLEIDNRQCVQASSQCFQSATDVAAFLGALASLGSLNIPYKIEAVQSETVEPPPPAQLHFMYVAAAAFVLLFFVGCGVLLSKRKMKLLSSIEQACDICRLKKLKCSKEKPKCAKCLKNNWECRYSPKTKRSPLTRAHLTEVESRLERLEQLFLLIFPREDLDMILKMDSLQDIKALLTGLFVQDNVNKDAVTDRLASVETDMPLTLRQHRISATSSSEESSNKGQRQLTVSAAAGGSGGSGGSDALDDFDLDMLGSDALDDFDLDMLGSDALDDFDLDMLGSDALDDFDLDMLGS

SEQ ID NO: 34 - protein, 820 aa, Artificial sequence
  Synthetic construct
MALPVTALLLPLALLLHAARPEQKLISEEDLDIQMTQTTSSLSASLGDRVTISCRASQDISKYLNWYQQKPDGTVKLLIYHTSRLHSGVPSRFSGSGSGTDYSLTISNLEQEDIATYFCQQGNTLPYTFGGGTKLEITGGGGSGGGGSGGGGSEVKLQESGPGLVAPSQSLSVTCTVSGVSLPDYGVSWIRQPPRKGLEWLGVIWGSETTYYNSALKSRLTIIKDNSKSQVFLKMNSLQTDDTAIYYCAKHYYYGGSYAMDYWGQGTSVTVSSILDYSFGGGAGRDIPPPLIEEACELPECQEDAGNKVCSLQCNNHACGWDGGDCSLNFNDPWKNCTQSLQCWKYFSDGHCDSQCNSAGCLFDGFDCQRAEGQCNPLYDQYCKDHFSDGHCDQGCNSAECEWDGLDCAEHVPERLAAGTLVVVVLMPPEQLRNSSFHFLRELSRVLHTNVVFKRDAHGQQMIFPYYGREEELRKHPIKRAAEGWAAPDALLGQVKASLLPGGSEGGRRRRELDPMDVRGSIVYLEIDNRQCVQASSQCFQSATDVAAFLGALASLGSLNIPYKIEAVQSETVEPPPPAQLHFMYVAAAAFVLLFFVGCGVLLSKFKRRMKLLSSIEQACDICRLKKLKCSKEKPKCAKCLKNNWECRYSPKTKRSPLTRAHLTEVESRLERLEQLFLLIFPREDLDMILKMDSLQDIKALLTGLFVQDNVNKDAVTDRLASVETDMPLTLRQHRISATSSSEESSNKGQRQLTVSAAAGGSGGSGGSDALDDFDLDMLGSDALDDFDLDMLGSDALDDFDLDMLGSDALDDFDLDMLGS

SEQ ID NO: 35 - protein, 819 aa, Artificial sequence
  Synthetic construct
MALPVTALLLPLALLLHAARPEQKLISEEDLDIQMTQTTSSLSASLGDRVTISCRASQDISKYLNWYQQKPDGTVKLLIYHTSRLHSGVPSRFSGSGSGTDYSLTISNLEQEDIATYFCQQGNTLPYTFGGGTKLEITGGGGSGGGGSGGGGSEVKLQESGPGLVAPSQSLSVTCTVSGVSLPDYGVSWIRQPPRKGLEWLGVIWGSETTYYNSALKSRLTIIKDNSKSQVFLKMNSLQTDDTAIYYCAKHYYYGGSYAMDYWGQGTSVTVSSILDYSFGGGAGRDIPPPLIEEACELPECQEDAGNKVCSLQCNNHACGWDGGDCSLNFNDPWKNCTQSLQCWKYFSDGHCDSQCNSAGCLFDGFDCQRAEGQCNPLYDQYCKDHFSDGHCDQGCNSAECEWDGLDCAEHVPERLAAGTLVVVVLMPPEQLRNSSFHFLRELSRVLHTNVVFKRDAHGQQMIFPYYGREEELRKHPIKRAAEGWAAPDALLGQVKASLLPGGSEGGRRRRELDPMDVRGSIVYLEIDNRQCVQASSQCFQSATDVAAFLGALASLGSLNIPYKIEAVQSETVEPPPPAQLHFMYVAAAAFVLLFFVGCGVLLSKHRRMKLLSSIEQACDICRLKKLKCSKEKPKCAKCLKNNWECRYSPKTKRSPLTRAHLTEVESRLERLEQLFLLIFPREDLDMILKMDSLQDIKALLTGLFVQDNVNKDAVTDRLASVETDMPLTLRQHRISATSSSEESSNKGQRQLTVSAAAGGSGGSGGSDALDDFDLDMLGSDALDDFDLDMLGSDALDDFDLDMLGSDALDDFDLDMLGS

SEQ ID NO: 36 - protein, 820 aa, Artificial sequence
  Synthetic construct
MALPVTALLLPLALLLHAARPEQKLISEEDLDIQMTQTTSSLSASLGDRVTISCRASQDISKYLNWYQQKPDGTVKLLIYHTSRLHSGVPSRFSGSGSGTDYSLTISNLEQEDIATYFCQQGNTLPYTFGGGTKLEITGGGGSGGGGSGGGGSEVKLQESGPGLVAPSQSLSVTCTVSGVSLPDYGVSWIRQPPRKGLEWLGVIWGSETTYYNSALKSRLTIIKDNSKSQVFLKMNSLQTDDTAIYYCAKHYYYGGSYAMDYWGQGTSVTVSSILDYSFGGGAGRDIPPPLIEEACELPECQEDAGNKVCSLQCNNHACGWDGGDCSLNFNDPWKNCTQSLQCWKYFSDGHCDSQCNSAGCLFDGFDCQRAEGQCNPLYDQYCKDHFSDGHCDQGCNSAECEWDGLDCAEHVPERLAAGTLVVVVLMPPEQLRNSSFHFLRELSRVLHTNVVFKRDAHGQQMIFPYYGREEELRKHPIKRAAEGWAAPDALLGQVKASLLPGGSEGGRRRRELDPMDVRGSIVYLEIDNRQCVQASSQCFQSATDVAAFLGALASLGSLNIPYKIEAVQSETVEPPPPAQLHFMYVAAAAFVLLFFVGCGVLLSRMKKKMKLLSSIEQACDICRLKKLKCSKEKPKCAKCLKNNWECRYSPKTKRSPLTRAHLTEVESRLERLEQLFLLIFPREDLDMILKMDSLQDIKALLTGLFVQDNVNKDAVTDRLASVETDMPLTLRQHRISATSSSEESSNKGQRQLTVSAAAGGSGGSGGSDALDDFDLDMLGSDALDDFDLDMLGSDALDDFDLDMLGSDALDDFDLDMLGS

SEQ ID NO: 37 - protein, 820 aa, Artificial sequence
  Synthetic construct
MALPVTALLLPLALLLHAARPEQKLISEEDLDIQMTQTTSSLSASLGDRVTISCRASQDISKYLNWYQQKPDGTVKLLIYHTSRLHSGVPSRFSGSGSGTDYSLTISNLEQEDIATYFCQQGNTLPYTFGGGTKLEITGGGGSGGGGSGGGGSEVKLQESGPGLVAPSQSLSVTCTVSGVSLPDYGVSWIRQPPRKGLEWLGVIWGSETTYYNSALKSRLTIIKDNSKSQVFLKMNSLQTDDTAIYYCAKHYYYGGSYAMDYWGQGTSVTVSSILDYSFGGGAGRDIPPPLIEEACELPECQEDAGNKVCSLQCNNHACGWDGGDCSLNFNDPWKNCTQSLQCWKYFSDGHCDSQCNSAGCLFDGFDCQRAEGQCNPLYDQYCKDHFSDGHCDQGCNSAECEWDGLDCAEHVPERLAAGTLVVVVLMPPEQLRNSSFHFLRELSRVLHTNVVFKRDAHGQQMIFPYYGREEELRKHPIKRAAEGWAAPDALLGQVKASLLPGGSEGGRRRRELDPMDVRGSIVYLEIDNRQCVQASSQCFQSATDVAAFLGALASLGSLNIPYKIEAVQSETVEPPPPAQLHFMYVAAAAFVLLFFVGCGVLLSRMRKKMKLLSSIEQACDICRLKKLKCSKEKPKCAKCLKNNWECRYSPKTKRSPLTRAHLTEVESRLERLEQLFLLIFPREDLDMILKMDSLQDIKALLTGLFVQDNVNKDAVTDRLASVETDMPLTLRQHRISATSSSEESSNKGQRQLTVSAAAGGSGGSGGSDALDDFDLDMLGSDALDDFDLDMLGSDALDDFDLDMLGSDALDDFDLDMLGS

SEQ ID NO: 38 - protein, 822 aa, Artificial sequence
  Synthetic construct
MALPVTALLLPLALLLHAARPEQKLISEEDLDIQMTQTTSSLSASLGDRVTISCRASQDISKYLNWYQQKPDGTVKLLIYHTSRLHSGVPSRFSGSGSGTDYSLTISNLEQEDIATYFCQQGNTLPYTFGGGTKLEITGGGGSGGGGSGGGGSEVKLQESGPGLVAPSQSLSVTCTVSGVSLPDYGVSWIRQPPRKGLEWLGVIWGSETTYYNSALKSRLTIIKDNSKSQVFLKMNSLQTDDTAIYYCAKHYYYGGSYAMDYWGQGTSVTVSSILDYSFGGGAGRDIPPPLIEEACELPECQEDAGNKVCSLQCNNHACGWDGGDCSLNFNDPWKNCTQSLQCWKYFSDGHCDSQCNSAGCLFDGFDCQRAEGQCNPLYDQYCKDHFSDGHCDQGCNSAECEWDGLDCAEHVPERLAAGTLVVVVLMPPEQLRNSSFHFLRELSRVLHTNVVFKRDAHGQQMIFPYYGREEELRKHPIKRAAEGWAAPDALLGQVKASLLPGGSEGGRRRRELDPMDVRGSIVYLEIDNRQCVQASSQCFQSATDVAAFLGALASLGSLNIPYKIEAVQSETVEPPPPAQLHFMYVAAAAFVLLFFVGCGVLLSRRRQKRRMKLLSSIEQACDICRLKKLKCSKEKPKCAKCLKNNWECRYSPKTKRSPLTRAHLTEVESRLERLEQLFLLIFPREDLDMILKMDSLQDIKALLTGLFVQDNVNKDAVTDRLASVETDMPLTLRQHRISATSSSEESSNKGQRQLTVSAAAGGSGGSGGSDALDDFDLDMLGSDALDDFDLDMLGSDALDDFDLDMLGSDALDDFDLDMLGS

SEQ ID NO: 39 - protein, 820 aa, Artificial sequence
  Synthetic construct
MALPVTALLLPLALLLHAARPEQKLISEEDLDIQMTQTTSSLSASLGDRVTISCRASQDISKYLNWYQQKPDGTVKLLIYHTSRLHSGVPSRFSGSGSGTDYSLTISNLEQEDIATYFCQQGNTLPYTFGGGTKLEITGGGGSGGGGSGGGGSEVKLQESGPGLVAPSQSLSVTCTVSGVSLPDYGVSWIRQPPRKGLEWLGVIWGSETTYYNSALKSRLTIIKDNSKSQVFLKMNSLQTDDTAIYYCAKHYYYGGSYAMDYWGQGTSVTVSSILDYSFGGGAGRDIPPPLIEEACELPECQEDAGNKVCSLQCNNHACGWDGGDCSLNFNDPWKNCTQSLQCWKYFSDGHCDSQCNSAGCLFDGFDCQRAEGQCNPLYDQYCKDHFSDGHCDQGCNSAECEWDGLDCAEHVPERLAAGTLVVVVLMPPEQLRNSSFHFLRELSRVLHTNVVFKRDAHGQQMIFPYYGREEELRKHPIKRAAEGWAAPDALLGQVKASLLPGGSEGGRRRRELDPMDVRGSIVYLEIDNRQCVQASSQCFQSATDVAAFLGALASLGSLNIPYKIEAVQSETVEPPPPAQLHFMYVAAAAFVLLFFVGCGVLLSRHKRKMKLLSSIEQACDICRLKKLKCSKEKPKCAKCLKNNWECRYSPKTKRSPLTRAHLTEVESRLERLEQLFLLIFPREDLDMILKMDSLQDIKALLTGLFVQDNVNKDAVTDRLASVETDMPLTLRQHRISATSSSEESSNKGQRQLTVSAAAGGSGGSGGSDALDDFDLDMLGSDALDDFDLDMLGSDALDDFDLDMLGSDALDDFDLDMLGS

SEQ ID NO: 40 - protein, 819 aa, Artificial sequence
  Synthetic construct
MALPVTALLLPLALLLHAARPEQKLISEEDLDIQMTQTTSSLSASLGDRVTISCRASQDISKYLNWYQQKPDGTVKLLIYHTSRLHSGVPSRFSGSGSGTDYSLTISNLEQEDIATYFCQQGNTLPYTFGGGTKLEITGGGGSGGGGSGGGGSEVKLQESGPGLVAPSQSLSVTCTVSGVSLPDYGVSWIRQPPRKGLEWLGVIWGSETTYYNSALKSRLTIIKDNSKSQVFLKMNSLQTDDTAIYYCAKHYYYGGSYAMDYWGQGTSVTVSSILDYSFGGGAGRDIPPPLIEEACELPECQEDAGNKVCSLQCNNHACGWDGGDCSLNFNDPWKNCTQSLQCWKYFSDGHCDSQCNSAGCLFDGFDCQRAEGQCNPLYDQYCKDHFSDGHCDQGCNSAECEWDGLDCAEHVPERLAAGTLVVVVLMPPEQLRNSSFHFLRELSRVLHTNVVFKRDAHGQQMIFPYYGREEELRKHPIKRAAEGWAAPDALLGQVKASLLPGGSEGGRRRRELDPMDVRGSIVYLEIDNRQCVQASSQCFQSATDVAAFLGALASLGSLNIPYKIEAVQSETVEPPPPAQLHFMYVAAAAFVLLFFVGCGVLLSRARRMKLLSSIEQACDICRLKKLKCSKEKPKCAKCLKNNWECRYSPKTKRSPLTRAHLTEVESRLERLEQLFLLIFPREDLDMILKMDSLQDIKALLTGLFVQDNVNKDAVTDRLASVETDMPLTLRQHRISATSSSEESSNKGQRQLTVSAAAGGSGGSGGSDALDDFDLDMLGSDALDDFDLDMLGSDALDDFDLDMLGSDALDDFDLDMLGS

SEQ ID NO: 41 - protein, 820 aa, Artificial sequence
  Synthetic construct
MALPVTALLLPLALLLHAARPEQKLISEEDLDIQMTQTTSSLSASLGDRVTISCRASQDISKYLNWYQQKPDGTVKLLIYHTSRLHSGVPSRFSGSGSGTDYSLTISNLEQEDIATYFCQQGNTLPYTFGGGTKLEITGGGGSGGGGSGGGGSEVKLQESGPGLVAPSQSLSVTCTVSGVSLPDYGVSWIRQPPRKGLEWLGVIWGSETTYYNSALKSRLTIIKDNSKSQVFLKMNSLQTDDTAIYYCAKHYYYGGSYAMDYWGQGTSVTVSSILDYSFGGGAGRDIPPPLIEEACELPECQEDAGNKVCSLQCNNHACGWDGGDCSLNFNDPWKNCTQSLQCWKYFSDGHCDSQCNSAGCLFDGFDCQRAEGQCNPLYDQYCKDHFSDGHCDQGCNSAECEWDGLDCAEHVPERLAAGTLVVVVLMPPEQLRNSSFHFLRELSRVLHTNVVFKRDAHGQQMIFPYYGREEELRKHPIKRAAEGWAAPDALLGQVKASLLPGGSEGGRRRRELDPMDVRGSIVYLEIDNRQCVQASSQCFQSATDVAAFLGALASLGSLNIPYKIEAVQSETVEPPPPAQLHFMYVAAAAFVLLFFVGCGVLLSRRLRKMKLLSSIEQACDICRLKKLKCSKEKPKCAKCLKNNWECRYSPKTKRSPLTRAHLTEVESRLERLEQLFLLIFPREDLDMILKMDSLQDIKALLTGLFVQDNVNKDAVTDRLASVETDMPLTLRQHRISATSSSEESSNKGQRQLTVSAAAGGSGGSGGSDALDDFDLDMLGSDALDDFDLDMLGSDALDDFDLDMLGSDALDDFDLDMLGS

SEQ ID NO: 42 - protein, 819 aa, Artificial sequence
  Synthetic construct
MALPVTALLLPLALLLHAARPEQKLISEEDLDIQMTQTTSSLSASLGDRVTISCRASQDISKYLNWYQQKPDGTVKLLIYHTSRLHSGVPSRFSGSGSGTDYSLTISNLEQEDIATYFCQQGNTLPYTFGGGTKLEITGGGGSGGGGSGGGGSEVKLQESGPGLVAPSQSLSVTCTVSGVSLPDYGVSWIRQPPRKGLEWLGVIWGSETTYYNSALKSRLTIIKDNSKSQVFLKMNSLQTDDTAIYYCAKHYYYGGSYAMDYWGQGTSVTVSSILDYSFGGGAGRDIPPPLIEEACELPECQEDAGNKVCSLQCNNHACGWDGGDCSLNFNDPWKNCTQSLQCWKYFSDGHCDSQCNSAGCLFDGFDCQRAEGQCNPLYDQYCKDHFSDGHCDQGCNSAECEWDGLDCAEHVPERLAAGTLVVVVLMPPEQLRNSSFHFLRELSRVLHTNVVFKRDAHGQQMIFPYYGREEELRKHPIKRAAEGWAAPDALLGQVKASLLPGGSEGGRRRRELDPMDVRGSIVYLEIDNRQCVQASSQCFQSATDVAAFLGALASLGSLNIPYKIEAVQSETVEPPPPAQLHFMYVAAAAFVLLFFVGCGVLLSRRGRMKLLSSIEQACDICRLKKLKCSKEKPKCAKCLKNNWECRYSPKTKRSPLTRAHLTEVESRLERLEQLFLLIFPREDLDMILKMDSLQDIKALLTGLFVQDNVNKDAVTDRLASVETDMPLTLRQHRISATSSSEESSNKGQRQLTVSAAAGGSGGSGGSDALDDFDLDMLGSDALDDFDLDMLGSDALDDFDLDMLGSDALDDFDLDMLGS

SEQ ID NO: 43 - protein, 820 aa, Artificial sequence
  Synthetic construct
MALPVTALLLPLALLLHAARPEQKLISEEDLDIQMTQTTSSLSASLGDRVTISCRASQDISKYLNWYQQKPDGTVKLLIYHTSRLHSGVPSRFSGSGSGTDYSLTISNLEQEDIATYFCQQGNTLPYTFGGGTKLEITGGGGSGGGGSGGGGSEVKLQESGPGLVAPSQSLSVTCTVSGVSLPDYGVSWIRQPPRKGLEWLGVIWGSETTYYNSALKSRLTIIKDNSKSQVFLKMNSLQTDDTAIYYCAKHYYYGGSYAMDYWGQGTSVTVSSILDYSFGGGAGRDIPPPLIEEACELPECQEDAGNKVCSLQCNNHACGWDGGDCSLNFNDPWKNCTQSLQCWKYFSDGHCDSQCNSAGCLFDGFDCQRAEGQCNPLYDQYCKDHFSDGHCDQGCNSAECEWDGLDCAEHVPERLAAGTLVVVVLMPPEQLRNSSFHFLRELSRVLHTNVVFKRDAHGQQMIFPYYGREEELRKHPIKRAAEGWAAPDALLGQVKASLLPGGSEGGRRRRELDPMDVRGSIVYLEIDNRQCVQASSQCFQSATDVAAFLGALASLGSLNIPYKIEAVQSETVEPPPPAQLHFMYVAAAAFVLLFFVGCGVLLSRKMKRMKLLSSIEQACDICRLKKLKCSKEKPKCAKCLKNNWECRYSPKTKRSPLTRAHLTEVESRLERLEQLFLLIFPREDLDMILKMDSLQDIKALLTGLFVQDNVNKDAVTDRLASVETDMPLTLRQHRISATSSSEESSNKGQRQLTVSAAAGGSGGSGGSDALDDFDLDMLGSDALDDFDLDMLGSDALDDFDLDMLGSDALDDFDLDMLGS

SEQ ID NO: 44 - protein, 828 aa, Artificial sequence
  Synthetic construct
MALPVTALLLPLALLLHAARPEQKLISEEDLDIQMTQTTSSLSASLGDRVTISCRASQDISKYLNWYQQKPDGTVKLLIYHTSRLHSGVPSRFSGSGSGTDYSLTISNLEQEDIATYFCQQGNTLPYTFGGGTKLEITGGGGSGGGGSGGGGSEVKLQESGPGLVAPSQSLSVTCTVSGVSLPDYGVSWIRQPPRKGLEWLGVIWGSETTYYNSALKSRLTIIKDNSKSQVFLKMNSLQTDDTAIYYCAKHYYYGGSYAMDYWGQGTSVTVSSILDYSFGGGAGRDIPPPLIEEACELPECQEDAGNKVCSLQCNNHACGWDGGDCSLNFNDPWKNCTQSLQCWKYFSDGHCDSQCNSAGCLFDGFDCQRAEGQCNPLYDQYCKDHFSDGHCDQGCNSAECEWDGLDCAEHVPERLAAGTLVVVVLMPPEQLRNSSFHFLRELSRVLHTNVVFKRDAHGQQMIFPYYGREEELRKHPIKRAAEGWAAPDALLGQVKASLLPGGSEGGRRRRELDPMDVRGSIVYLEIDNRQCVQASSQCFQSATDVAAFLGALASLGSLNIPYKIEAVQSETVEPPPPAQLHFMYVAAAAFVLLFFVGCGVLLSRRRLRKQARAHGKMKLLSSIEQACDICRLKKLKCSKEKPKCAKCLKNNWECRYSPKTKRSPLTRAHLTEVESRLERLEQLFLLIFPREDLDMILKMDSLQDIKALLTGLFVQDNVNKDAVTDRLASVETDMPLTLRQHRISATSSSEESSNKGQRQLTVSAAAGGSGGSGGSDALDDFDLDMLGSDALDDFDLDMLGSDALDDFDLDMLGSDALDDFDLDMLGS

SEQ ID NO: 45 - protein, 824 aa, Artificial sequence
  Synthetic construct
MALPVTALLLPLALLLHAARPEQKLISEEDLDIQMTQTTSSLSASLGDRVTISCRASQDISKYLNWYQQKPDGTVKLLIYHTSRLHSGVPSRFSGSGSGTDYSLTISNLEQEDIATYFCQQGNTLPYTFGGGTKLEITGGGGSGGGGSGGGGSEVKLQESGPGLVAPSQSLSVTCTVSGVSLPDYGVSWIRQPPRKGLEWLGVIWGSETTYYNSALKSRLTIIKDNSKSQVFLKMNSLQTDDTAIYYCAKHYYYGGSYAMDYWGQGTSVTVSSILDYSFGGGAGRDIPPPLIEEACELPECQEDAGNKVCSLQCNNHACGWDGGDCSLNFNDPWKNCTQSLQCWKYFSDGHCDSQCNSAGCLFDGFDCQRAEGQCNPLYDQYCKDHFSDGHCDQGCNSAECEWDGLDCAEHVPERLAAGTLVVVVLMPPEQLRNSSFHFLRELSRVLHTNVVFKRDAHGQQMIFPYYGREEELRKHPIKRAAEGWAAPDALLGQVKASLLPGGSEGGRRRRELDPMDVRGSIVYLEIDNRQCVQASSQCFQSATDVAAFLGALASLGSLNIPYKIEAVQSETVEPPPPAQLHFMYVAAAAFVLLFFVGCGVLLSKRSKSRKTKMKLLSSIEQACDICRLKKLKCSKEKPKCAKCLKNNWECRYSPKTKRSPLTRAHLTEVESRLERLEQLFLLIFPREDLDMILKMDSLQDIKALLTGLFVQDNVNKDAVTDRLASVETDMPLTLRQHRISATSSSEESSNKGQRQLTVSAAAGGSGGSGGSDALDDFDLDMLGSDALDDFDLDMLGSDALDDFDLDMLGSDALDDFDLDMLGS

SEQ ID NO: 46 - protein, 823 aa, Artificial sequence
  Synthetic construct
MALPVTALLLPLALLLHAARPEQKLISEEDLDIQMTQTTSSLSASLGDRVTISCRASQDISKYLNWYQQKPDGTVKLLIYHTSRLHSGVPSRFSGSGSGTDYSLTISNLEQEDIATYFCQQGNTLPYTFGGGTKLEITGGGGSGGGGSGGGGSEVKLQESGPGLVAPSQSLSVTCTVSGVSLPDYGVSWIRQPPRKGLEWLGVIWGSETTYYNSALKSRLTIIKDNSKSQVFLKMNSLQTDDTAIYYCAKHYYYGGSYAMDYWGQGTSVTVSSILDYSFGGGAGRDIPPPLIEEACELPECQEDAGNKVCSLQCNNHACGWDGGDCSLNFNDPWKNCTQSLQCWKYFSDGHCDSQCNSAGCLFDGFDCQRAEGQCNPLYDQYCKDHFSDGHCDQGCNSAECEWDGLDCAEHVPERLAAGTLVVVVLMPPEQLRNSSFHFLRELSRVLHTNVVFKRDAHGQQMIFPYYGREEELRKHPIKRAAEGWAAPDALLGQVKASLLPGGSEGGRRRRELDPMDVRGSIVYLEIDNRQCVQASSQCFQSATDVAAFLGALASLGSLNIPYKIEAVQSETVEPPPPAQLHFMYVAAAAFVLLFFVGCGVLLSRRRRHTFKMKLLSSIEQACDICRLKKLKCSKEKPKCAKCLKNNWECRYSPKTKRSPLTRAHLTEVESRLERLEQLFLLIFPREDLDMILKMDSLQDIKALLTGLFVQDNVNKDAVTDRLASVETDMPLTLRQHRISATSSSEESSNKGQRQLTVSAAAGGSGGSGGSDALDDFDLDMLGSDALDDFDLDMLGSDALDDFDLDMLGSDALDDFDLDMLGS

SEQ ID NO: 47 - protein, 823 aa, Artificial sequence
  Synthetic construct
MALPVTALLLPLALLLHAARPEQKLISEEDLDIQMTQTTSSLSASLGDRVTISCRASQDISKYLNWYQQKPDGTVKLLIYHTSRLHSGVPSRFSGSGSGTDYSLTISNLEQEDIATYFCQQGNTLPYTFGGGTKLEITGGGGSGGGGSGGGGSEVKLQESGPGLVAPSQSLSVTCTVSGVSLPDYGVSWIRQPPRKGLEWLGVIWGSETTYYNSALKSRLTIIKDNSKSQVFLKMNSLQTDDTAIYYCAKHYYYGGSYAMDYWGQGTSVTVSSILDYSFGGGAGRDIPPPLIEEACELPECQEDAGNKVCSLQCNNHACGWDGGDCSLNFNDPWKNCTQSLQCWKYFSDGHCDSQCNSAGCLFDGFDCQRAEGQCNPLYDQYCKDHFSDGHCDQGCNSAECEWDGLDCAEHVPERLAAGTLVVVVLMPPEQLRNSSFHFLRELSRVLHTNVVFKRDAHGQQMIFPYYGREEELRKHPIKRAAEGWAAPDALLGQVKASLLPGGSEGGRRRRELDPMDVRGSIVYLEIDNRQCVQASSQCFQSATDVAAFLGALASLGSLNIPYKIEAVQSETVEPPPPAQLHFMYVAAAAFVLLFFVGCGVLLSKKGRRSYKMKLLSSIEQACDICRLKKLKCSKEKPKCAKCLKNNWECRYSPKTKRSPLTRAHLTEVESRLERLEQLFLLIFPREDLDMILKMDSLQDIKALLTGLFVQDNVNKDAVTDRLASVETDMPLTLRQHRISATSSSEESSNKGQRQLTVSAAAGGSGGSGGSDALDDFDLDMLGSDALDDFDLDMLGSDALDDFDLDMLGSDALDDFDLDMLGS

SEQ ID NO: 48 - protein, 830 aa, Artificial sequence
  Synthetic construct
MALPVTALLLPLALLLHAARPEQKLISEEDLDIQMTQTTSSLSASLGDRVTISCRASQDISKYLNWYQQKPDGTVKLLIYHTSRLHSGVPSRFSGSGSGTDYSLTISNLEQEDIATYFCQQGNTLPYTFGGGTKLEITGGGGSGGGGSGGGGSEVKLQESGPGLVAPSQSLSVTCTVSGVSLPDYGVSWIRQPPRKGLEWLGVIWGSETTYYNSALKSRLTIIKDNSKSQVFLKMNSLQTDDTAIYYCAKHYYYGGSYAMDYWGQGTSVTVSSILDYSFGGGAGRDIPPPLIEEACELPECQEDAGNKVCSLQCNNHACGWDGGDCSLNFNDPWKNCTQSLQCWKYFSDGHCDSQCNSAGCLFDGFDCQRAEGQCNPLYDQYCKDHFSDGHCDQGCNSAECEWDGLDCAEHVPERLAAGTLVVVVLMPPEQLRNSSFHFLRELSRVLHTNVVFKRDAHGQQMIFPYYGREEELRKHPIKRAAEGWAAPDALLGQVKASLLPGGSEGGRRRRELDPMDVRGSIVYLEIDNRQCVQASSQCFQSATDVAAFLGALASLGSLNIPYKIEAVQSETVEPPPPAQLHFMYVAAAAFVLLFFVGCGVLLSRFKKTWKLRALKEGKMKLLSSIEQACDICRLKKLKCSKEKPKCAKCLKNNWECRYSPKTKRSPLTRAHLTEVESRLERLEQLFLLIFPREDLDMILKMDSLQDIKALLTGLFVQDNVNKDAVTDRLASVETDMPLTLRQHRISATSSSEESSNKGQRQLTVSAAAGGSGGSGGSDALDDFDLDMLGSDALDDFDLDMLGSDALDDFDLDMLGSDALDDFDLDMLGS

SEQ ID NO: 49 - protein, 824 aa, Artificial sequence
  Synthetic construct
MALPVTALLLPLALLLHAARPEQKLISEEDLDIQMTQTTSSLSASLGDRVTISCRASQDISKYLNWYQQKPDGTVKLLIYHTSRLHSGVPSRFSGSGSGTDYSLTISNLEQEDIATYFCQQGNTLPYTFGGGTKLEITGGGGSGGGGSGGGGSEVKLQESGPGLVAPSQSLSVTCTVSGVSLPDYGVSWIRQPPRKGLEWLGVIWGSETTYYNSALKSRLTIIKDNSKSQVFLKMNSLQTDDTAIYYCAKHYYYGGSYAMDYWGQGTSVTVSSILDYSFGGGAGRDIPPPLIEEACELPECQEDAGNKVCSLQCNNHACGWDGGDCSLNFNDPWKNCTQSLQCWKYFSDGHCDSQCNSAGCLFDGFDCQRAEGQCNPLYDQYCKDHFSDGHCDQGCNSAECEWDGLDCAEHVPERLAAGTLVVVVLMPPEQLRNSSFHFLRELSRVLHTNVVFKRDAHGQQMIFPYYGREEELRKHPIKRAAEGWAAPDALLGQVKASLLPGGSEGGRRRRELDPMDVRGSIVYLEIDNRQCVQASSQCFQSATDVAAFLGALASLGSLNIPYKIEAVQSETVEPPPPAQLHFMYVAAAAFVLLFFVGCGVLLSKLRKRHRKHMKLLSSIEQACDICRLKKLKCSKEKPKCAKCLKNNWECRYSPKTKRSPLTRAHLTEVESRLERLEQLFLLIFPREDLDMILKMDSLQDIKALLTGLFVQDNVNKDAVTDRLASVETDMPLTLRQHRISATSSSEESSNKGQRQLTVSAAAGGSGGSGGSDALDDFDLDMLGSDALDDFDLDMLGSDALDDFDLDMLGSDALDDFDLDMLGS

SEQ ID NO: 50 - protein, 824 aa, Artificial sequence
  Synthetic construct
MALPVTALLLPLALLLHAARPEQKLISEEDLDIQMTQTTSSLSASLGDRVTISCRASQDISKYLNWYQQKPDGTVKLLIYHTSRLHSGVPSRFSGSGSGTDYSLTISNLEQEDIATYFCQQGNTLPYTFGGGTKLEITGGGGSGGGGSGGGGSEVKLQESGPGLVAPSQSLSVTCTVSGVSLPDYGVSWIRQPPRKGLEWLGVIWGSETTYYNSALKSRLTIIKDNSKSQVFLKMNSLQTDDTAIYYCAKHYYYGGSYAMDYWGQGTSVTVSSILDYSFGGGAGRDIPPPLIEEACELPECQEDAGNKVCSLQCNNHACGWDGGDCSLNFNDPWKNCTQSLQCWKYFSDGHCDSQCNSAGCLFDGFDCQRAEGQCNPLYDQYCKDHFSDGHCDQGCNSAECEWDGLDCAEHVPERLAAGTLVVVVLMPPEQLRNSSFHFLRELSRVLHTNVVFKRDAHGQQMIFPYYGREEELRKHPIKRAAEGWAAPDALLGQVKASLLPGGSEGGRRRRELDPMDVRGSIVYLEIDNRQCVQASSQCFQSATDVAAFLGALASLGSLNIPYKIEAVQSETVEPPPPAQLHFMYVAAAAFVLLFFVGCGVLLSRRRCGQKKKMKLLSSIEQACDICRLKKLKCSKEKPKCAKCLKNNWECRYSPKTKRSPLTRAHLTEVESRLERLEQLFLLIFPREDLDMILKMDSLQDIKALLTGLFVQDNVNKDAVTDRLASVETDMPLTLRQHRISATSSSEESSNKGQRQLTVSAAAGGSGGSGGSDALDDFDLDMLGSDALDDFDLDMLGSDALDDFDLDMLGSDALDDFDLDMLGS

SEQ ID NO: 51 - protein, 826 aa, Artificial sequence
  Synthetic construct
MALPVTALLLPLALLLHAARPEQKLISEEDLDIQMTQTTSSLSASLGDRVTISCRASQDISKYLNWYQQKPDGTVKLLIYHTSRLHSGVPSRFSGSGSGTDYSLTISNLEQEDIATYFCQQGNTLPYTFGGGTKLEITGGGGSGGGGSGGGGSEVKLQESGPGLVAPSQSLSVTCTVSGVSLPDYGVSWIRQPPRKGLEWLGVIWGSETTYYNSALKSRLTIIKDNSKSQVFLKMNSLQTDDTAIYYCAKHYYYGGSYAMDYWGQGTSVTVSSILDYSFGGGAGRDIPPPLIEEACELPECQEDAGNKVCSLQCNNHACGWDGGDCSLNFNDPWKNCTQSLQCWKYFSDGHCDSQCNSAGCLFDGFDCQRAEGQCNPLYDQYCKDHFSDGHCDQGCNSAECEWDGLDCAEHVPERLAAGTLVVVVLMPPEQLRNSSFHFLRELSRVLHTNVVFKRDAHGQQMIFPYYGREEELRKHPIKRAAEGWAAPDALLGQVKASLLPGGSEGGRRRRELDPMDVRGSIVYLEIDNRQCVQASSQCFQSATDVAAFLGALASLGSLNIPYKIEAVQSETVEPPPPAQLHFMYVAAAAFVLLFFVGCGVLLSRIRAAHRRTMRMKLLSSIEQACDICRLKKLKCSKEKPKCAKCLKNNWECRYSPKTKRSPLTRAHLTEVESRLERLEQLFLLIFPREDLDMILKMDSLQDIKALLTGLFVQDNVNKDAVTDRLASVETDMPLTLRQHRISATSSSEESSNKGQRQLTVSAAAGGSGGSGGSDALDDFDLDMLGSDALDDFDLDMLGSDALDDFDLDMLGSDALDDFDLDMLGS

SEQ ID NO: 52 - protein, 824 aa, Artificial sequence
  Synthetic construct
MALPVTALLLPLALLLHAARPEQKLISEEDLDIQMTQTTSSLSASLGDRVTISCRASQDISKYLNWYQQKPDGTVKLLIYHTSRLHSGVPSRFSGSGSGTDYSLTISNLEQEDIATYFCQQGNTLPYTFGGGTKLEITGGGGSGGGGSGGGGSEVKLQESGPGLVAPSQSLSVTCTVSGVSLPDYGVSWIRQPPRKGLEWLGVIWGSETTYYNSALKSRLTIIKDNSKSQVFLKMNSLQTDDTAIYYCAKHYYYGGSYAMDYWGQGTSVTVSSILDYSFGGGAGRDIPPPLIEEACELPECQEDAGNKVCSLQCNNHACGWDGGDCSLNFNDPWKNCTQSLQCWKYFSDGHCDSQCNSAGCLFDGFDCQRAEGQCNPLYDQYCKDHFSDGHCDQGCNSAECEWDGLDCAEHVPERLAAGTLVVVVLMPPEQLRNSSFHFLRELSRVLHTNVVFKRDAHGQQMIFPYYGREEELRKHPIKRAAEGWAAPDALLGQVKASLLPGGSEGGRRRRELDPMDVRGSIVYLEIDNRQCVQASSQCFQSATDVAAFLGALASLGSLNIPYKIEAVQSETVEPPPPAQLHFMYVAAAAFVLLFFVGCGVLLSRNWKRKNTKMKLLSSIEQACDICRLKKLKCSKEKPKCAKCLKNNWECRYSPKTKRSPLTRAHLTEVESRLERLEQLFLLIFPREDLDMILKMDSLQDIKALLTGLFVQDNVNKDAVTDRLASVETDMPLTLRQHRISATSSSEESSNKGQRQLTVSAAAGGSGGSGGSDALDDFDLDMLGSDALDDFDLDMLGSDALDDFDLDMLGSDALDDFDLDMLGS

SEQ ID NO: 53 - protein, 824 aa, Artificial sequence
  Synthetic construct
MALPVTALLLPLALLLHAARPEQKLISEEDLDIQMTQTTSSLSASLGDRVTISCRASQDISKYLNWYQQKPDGTVKLLIYHTSRLHSGVPSRFSGSGSGTDYSLTISNLEQEDIATYFCQQGNTLPYTFGGGTKLEITGGGGSGGGGSGGGGSEVKLQESGPGLVAPSQSLSVTCTVSGVSLPDYGVSWIRQPPRKGLEWLGVIWGSETTYYNSALKSRLTIIKDNSKSQVFLKMNSLQTDDTAIYYCAKHYYYGGSYAMDYWGQGTSVTVSSILDYSFGGGAGRDIPPPLIEEACELPECQEDAGNKVCSLQCNNHACGWDGGDCSLNFNDPWKNCTQSLQCWKYFSDGHCDSQCNSAGCLFDGFDCQRAEGQCNPLYDQYCKDHFSDGHCDQGCNSAECEWDGLDCAEHVPERLAAGTLVVVVLMPPEQLRNSSFHFLRELSRVLHTNVVFKRDAHGQQMIFPYYGREEELRKHPIKRAAEGWAAPDALLGQVKASLLPGGSEGGRRRRELDPMDVRGSIVYLEIDNRQCVQASSQCFQSATDVAAFLGALASLGSLNIPYKIEAVQSETVEPPPPAQLHFMYVAAAAFVLLFFVGCGVLLSKVYKWKQSRMKLLSSIEQACDICRLKKLKCSKEKPKCAKCLKNNWECRYSPKTKRSPLTRAHLTEVESRLERLEQLFLLIFPREDLDMILKMDSLQDIKALLTGLFVQDNVNKDAVTDRLASVETDMPLTLRQHRISATSSSEESSNKGQRQLTVSAAAGGSGGSGGSDALDDFDLDMLGSDALDDFDLDMLGSDALDDFDLDMLGSDALDDFDLDMLGS

SEQ ID NO: 54 - protein, 829 aa, Artificial sequence
  Synthetic construct
MALPVTALLLPLALLLHAARPEQKLISEEDLDIQMTQTTSSLSASLGDRVTISCRASQDISKYLNWYQQKPDGTVKLLIYHTSRLHSGVPSRFSGSGSGTDYSLTISNLEQEDIATYFCQQGNTLPYTFGGGTKLEITGGGGSGGGGSGGGGSEVKLQESGPGLVAPSQSLSVTCTVSGVSLPDYGVSWIRQPPRKGLEWLGVIWGSETTYYNSALKSRLTIIKDNSKSQVFLKMNSLQTDDTAIYYCAKHYYYGGSYAMDYWGQGTSVTVSSILDYSFGGGAGRDIPPPLIEEACELPECQEDAGNKVCSLQCNNHACGWDGGDCSLNFNDPWKNCTQSLQCWKYFSDGHCDSQCNSAGCLFDGFDCQRAEGQCNPLYDQYCKDHFSDGHCDQGCNSAECEWDGLDCAEHVPERLAAGTLVVVVLMPPEQLRNSSFHFLRELSRVLHTNVVFKRDAHGQQMIFPYYGREEELRKHPIKRAAEGWAAPDALLGQVKASLLPGGSEGGRRRRELDPMDVRGSIVYLEIDNRQCVQASSQCFQSATDVAAFLGALASLGSLNIPYKIEAVQSETVEPPPPAQLHFMYVAAAAFVLLFFVGCGVLLSKTKKQRKKLHDRLRMKLLSSIEQACDICRLKKLKCSKEKPKCAKCLKNNWECRYSPKTKRSPLTRAHLTEVESRLERLEQLFLLIFPREDLDMILKMDSLQDIKALLTGLFVQDNVNKDAVTDRLASVETDMPLTLRQHRISATSSSEESSNKGQRQLTVSAAAGGSGGSGGSDALDDFDLDMLGSDALDDFDLDMLGSDALDDFDLDMLGSDALDDFDLDMLGS

SEQ ID NO: 55 - protein, 826 aa, Artificial sequence
  Synthetic construct
MALPVTALLLPLALLLHAARPEQKLISEEDLDIQMTQTTSSLSASLGDRVTISCRASQDISKYLNWYQQKPDGTVKLLIYHTSRLHSGVPSRFSGSGSGTDYSLTISNLEQEDIATYFCQQGNTLPYTFGGGTKLEITGGGGSGGGGSGGGGSEVKLQESGPGLVAPSQSLSVTCTVSGVSLPDYGVSWIRQPPRKGLEWLGVIWGSETTYYNSALKSRLTIIKDNSKSQVFLKMNSLQTDDTAIYYCAKHYYYGGSYAMDYWGQGTSVTVSSILDYSFGGGAGRDIPPPLIEEACELPECQEDAGNKVCSLQCNNHACGWDGGDCSLNFNDPWKNCTQSLQCWKYFSDGHCDSQCNSAGCLFDGFDCQRAEGQCNPLYDQYCKDHFSDGHCDQGCNSAECEWDGLDCAEHVPERLAAGTLVVVVLMPPEQLRNSSFHFLRELSRVLHTNVVFKRDAHGQQMIFPYYGREEELRKHPIKRAAEGWAAPDALLGQVKASLLPGGSEGGRRRRELDPMDVRGSIVYLEIDNRQCVQASSQCFQSATDVAAFLGALASLGSLNIPYKIEAVQSETVEPPPPAQLHFMYVAAAAFVLLFFVGCGVLLSKRKRRTKTIRRMKLLSSIEQACDICRLKKLKCSKEKPKCAKCLKNNWECRYSPKTKRSPLTRAHLTEVESRLERLEQLFLLIFPREDLDMILKMDSLQDIKALLTGLFVQDNVNKDAVTDRLASVETDMPLTLRQHRISATSSSEESSNKGQRQLTVSAAAGGSGGSGGSDALDDFDLDMLGSDALDDFDLDMLGSDALDDFDLDMLGSDALDDFDLDMLGS

SEQ ID NO: 56 - protein, 829 aa, Artificial sequence
  Synthetic construct
MALPVTALLLPLALLLHAARPEQKLISEEDLDIQMTQTTSSLSASLGDRVTISCRASQDISKYLNWYQQKPDGTVKLLIYHTSRLHSGVPSRFSGSGSGTDYSLTISNLEQEDIATYFCQQGNTLPYTFGGGTKLEITGGGGSGGGGSGGGGSEVKLQESGPGLVAPSQSLSVTCTVSGVSLPDYGVSWIRQPPRKGLEWLGVIWGSETTYYNSALKSRLTIIKDNSKSQVFLKMNSLQTDDTAIYYCAKHYYYGGSYAMDYWGQGTSVTVSSILDYSFGGGAGRDIPPPLIEEACELPECQEDAGNKVCSLQCNNHACGWDGGDCSLNFNDPWKNCTQSLQCWKYFSDGHCDSQCNSAGCLFDGFDCQRAEGQCNPLYDQYCKDHFSDGHCDQGCNSAECEWDGLDCAEHVPERLAAGTLVVVVLMPPEQLRNSSFHFLRELSRVLHTNVVFKRDAHGQQMIFPYYGREEELRKHPIKRAAEGWAAPDALLGQVKASLLPGGSEGGRRRRELDPMDVRGSIVYLEIDNRQCVQASSQCFQSATDVAAFLGALASLGSLNIPYKIEAVQSETVEPPPPAQLHFMYVAAAAFVLLFFVGCGVLLSRKRRKERERSRLPRMKLLSSIEQACDICRLKKLKCSKEKPKCAKCLKNNWECRYSPKTKRSPLTRAHLTEVESRLERLEQLFLLIFPREDLDMILKMDSLQDIKALLTGLFVQDNVNKDAVTDRLASVETDMPLTLRQHRISATSSSEESSNKGQRQLTVSAAAGGSGGSGGSDALDDFDLDMLGSDALDDFDLDMLGSDALDDFDLDMLGSDALDDFDLDMLGS

SEQ ID NO: 57 - protein, 824 aa, Artificial sequence
  Synthetic construct
MALPVTALLLPLALLLHAARPEQKLISEEDLDIQMTQTTSSLSASLGDRVTISCRASQDISKYLNWYQQKPDGTVKLLIYHTSRLHSGVPSRFSGSGSGTDYSLTISNLEQEDIATYFCQQGNTLPYTFGGGTKLEITGGGGSGGGGSGGGGSEVKLQESGPGLVAPSQSLSVTCTVSGVSLPDYGVSWIRQPPRKGLEWLGVIWGSETTYYNSALKSRLTIIKDNSKSQVFLKMNSLQTDDTAIYYCAKHYYYGGSYAMDYWGQGTSVTVSSILDYSFGGGAGRDIPPPLIEEACELPECQEDAGNKVCSLQCNNHACGWDGGDCSLNFNDPWKNCTQSLQCWKYFSDGHCDSQCNSAGCLFDGFDCQRAEGQCNPLYDQYCKDHFSDGHCDQGCNSAECEWDGLDCAEHVPERLAAGTLVVVVLMPPEQLRNSSFHFLRELSRVLHTNVVFKRDAHGQQMIFPYYGREEELRKHPIKRAAEGWAAPDALLGQVKASLLPGGSEGGRRRRELDPMDVRGSIVYLEIDNRQCVQASSQCFQSATDVAAFLGALASLGSLNIPYKIEAVQSETVEPPPPAQLHFMYVAAAAFVLLFFVGCGVLLSKYRRRHRKHMKLLSSIEQACDICRLKKLKCSKEKPKCAKCLKNNWECRYSPKTKRSPLTRAHLTEVESRLERLEQLFLLIFPREDLDMILKMDSLQDIKALLTGLFVQDNVNKDAVTDRLASVETDMPLTLRQHRISATSSSEESSNKGQRQLTVSAAAGGSGGSGGSDALDDFDLDMLGSDALDDFDLDMLGSDALDDFDLDMLGSDALDDFDLDMLGS

SEQ ID NO: 58 - protein, 823 aa, Artificial sequence
  Synthetic construct
MALPVTALLLPLALLLHAARPEQKLISEEDLDIQMTQTTSSLSASLGDRVTISCRASQDISKYLNWYQQKPDGTVKLLIYHTSRLHSGVPSRFSGSGSGTDYSLTISNLEQEDIATYFCQQGNTLPYTFGGGTKLEITGGGGSGGGGSGGGGSEVKLQESGPGLVAPSQSLSVTCTVSGVSLPDYGVSWIRQPPRKGLEWLGVIWGSETTYYNSALKSRLTIIKDNSKSQVFLKMNSLQTDDTAIYYCAKHYYYGGSYAMDYWGQGTSVTVSSILDYSFGGGAGRDIPPPLIEEACELPECQEDAGNKVCSLQCNNHACGWDGGDCSLNFNDPWKNCTQSLQCWKYFSDGHCDSQCNSAGCLFDGFDCQRAEGQCNPLYDQYCKDHFSDGHCDQGCNSAECEWDGLDCAEHVPERLAAGTLVVVVLMPPEQLRNSSFHFLRELSRVLHTNVVFKRDAHGQQMIFPYYGREEELRKHPIKRAAEGWAAPDALLGQVKASLLPGGSEGGRRRRELDPMDVRGSIVYLEIDNRQCVQASSQCFQSATDVAAFLGALASLGSLNIPYKIEAVQSETVEPPPPAQLHFMYVAAAAFVLLFFVGCGVLLSRLRLQKHRMKLLSSIEQACDICRLKKLKCSKEKPKCAKCLKNNWECRYSPKTKRSPLTRAHLTEVESRLERLEQLFLLIFPREDLDMILKMDSLQDIKALLTGLFVQDNVNKDAVTDRLASVETDMPLTLRQHRISATSSSEESSNKGQRQLTVSAAAGGSGGSGGSDALDDFDLDMLGSDALDDFDLDMLGSDALDDFDLDMLGSDALDDFDLDMLGS

SEQ ID NO: 59 - protein, 823 aa, Artificial sequence
  Synthetic construct
MALPVTALLLPLALLLHAARPEQKLISEEDLDIQMTQTTSSLSASLGDRVTISCRASQDISKYLNWYQQKPDGTVKLLIYHTSRLHSGVPSRFSGSGSGTDYSLTISNLEQEDIATYFCQQGNTLPYTFGGGTKLEITGGGGSGGGGSGGGGSEVKLQESGPGLVAPSQSLSVTCTVSGVSLPDYGVSWIRQPPRKGLEWLGVIWGSETTYYNSALKSRLTIIKDNSKSQVFLKMNSLQTDDTAIYYCAKHYYYGGSYAMDYWGQGTSVTVSSILDYSFGGGAGRDIPPPLIEEACELPECQEDAGNKVCSLQCNNHACGWDGGDCSLNFNDPWKNCTQSLQCWKYFSDGHCDSQCNSAGCLFDGFDCQRAEGQCNPLYDQYCKDHFSDGHCDQGCNSAECEWDGLDCAEHVPERLAAGTLVVVVLMPPEQLRNSSFHFLRELSRVLHTNVVFKRDAHGQQMIFPYYGREEELRKHPIKRAAEGWAAPDALLGQVKASLLPGGSEGGRRRRELDPMDVRGSIVYLEIDNRQCVQASSQCFQSATDVAAFLGALASLGSLNIPYKIEAVQSETVEPPPPAQLHFMYVAAAAFVLLFFVGCGVLLSRVRIAHQHMKLLSSIEQACDICRLKKLKCSKEKPKCAKCLKNNWECRYSPKTKRSPLTRAHLTEVESRLERLEQLFLLIFPREDLDMILKMDSLQDIKALLTGLFVQDNVNKDAVTDRLASVETDMPLTLRQHRISATSSSEESSNKGQRQLTVSAAAGGSGGSGGSDALDDFDLDMLGSDALDDFDLDMLGSDALDDFDLDMLGSDALDDFDLDMLGS

SEQ ID NO: 60 - protein, 825 aa, Artificial sequence
  Synthetic construct
MALPVTALLLPLALLLHAARPEQKLISEEDLDIQMTQTTSSLSASLGDRVTISCRASQDISKYLNWYQQKPDGTVKLLIYHTSRLHSGVPSRFSGSGSGTDYSLTISNLEQEDIATYFCQQGNTLPYTFGGGTKLEITGGGGSGGGGSGGGGSEVKLQESGPGLVAPSQSLSVTCTVSGVSLPDYGVSWIRQPPRKGLEWLGVIWGSETTYYNSALKSRLTIIKDNSKSQVFLKMNSLQTDDTAIYYCAKHYYYGGSYAMDYWGQGTSVTVSSILDYSFGGGAGRDIPPPLIEEACELPECQEDAGNKVCSLQCNNHACGWDGGDCSLNFNDPWKNCTQSLQCWKYFSDGHCDSQCNSAGCLFDGFDCQRAEGQCNPLYDQYCKDHFSDGHCDQGCNSAECEWDGLDCAEHVPERLAAGTLVVVVLMPPEQLRNSSFHFLRELSRVLHTNVVFKRDAHGQQMIFPYYGREEELRKHPIKRAAEGWAAPDALLGQVKASLLPGGSEGGRRRRELDPMDVRGSIVYLEIDNRQCVQASSQCFQSATDVAAFLGALASLGSLNIPYKIEAVQSETVEPPPPAQLHFMYVAAAAFVLLFFVGCGVLLSRKKRMAKYEKMKLLSSIEQACDICRLKKLKCSKEKPKCAKCLKNNWECRYSPKTKRSPLTRAHLTEVESRLERLEQLFLLIFPREDLDMILKMDSLQDIKALLTGLFVQDNVNKDAVTDRLASVETDMPLTLRQHRISATSSSEESSNKGQRQLTVSAAAGGSGGSGGSDALDDFDLDMLGSDALDDFDLDMLGSDALDDFDLDMLGSDALDDFDLDMLGS

SEQ ID NO: 61 - protein, 828 aa, Artificial sequence
  Synthetic construct
MALPVTALLLPLALLLHAARPEQKLISEEDLDIQMTQTTSSLSASLGDRVTISCRASQDISKYLNWYQQKPDGTVKLLIYHTSRLHSGVPSRFSGSGSGTDYSLTISNLEQEDIATYFCQQGNTLPYTFGGGTKLEITGGGGSGGGGSGGGGSEVKLQESGPGLVAPSQSLSVTCTVSGVSLPDYGVSWIRQPPRKGLEWLGVIWGSETTYYNSALKSRLTIIKDNSKSQVFLKMNSLQTDDTAIYYCAKHYYYGGSYAMDYWGQGTSVTVSSILDYSFGGGAGRDIPPPLIEEACELPECQEDAGNKVCSLQCNNHACGWDGGDCSLNFNDPWKNCTQSLQCWKYFSDGHCDSQCNSAGCLFDGFDCQRAEGQCNPLYDQYCKDHFSDGHCDQGCNSAECEWDGLDCAEHVPERLAAGTLVVVVLMPPEQLRNSSFHFLRELSRVLHTNVVFKRDAHGQQMIFPYYGREEELRKHPIKRAAEGWAAPDALLGQVKASLLPGGSEGGRRRRELDPMDVRGSIVYLEIDNRQCVQASSQCFQSATDVAAFLGALASLGSLNIPYKIEAVQSETVEPPPPAQLHFMYVAAAAFVLLFFVGCGVLLSRRKSIKKKRALRRMKLLSSIEQACDICRLKKLKCSKEKPKCAKCLKNNWECRYSPKTKRSPLTRAHLTEVESRLERLEQLFLLIFPREDLDMILKMDSLQDIKALLTGLFVQDNVNKDAVTDRLASVETDMPLTLRQHRISATSSSEESSNKGQRQLTVSAAAGGSGGSGGSDALDDFDLDMLGSDALDDFDLDMLGSDALDDFDLDMLGSDALDDFDLDMLGS

SEQ ID NO: 62 - protein, 823 aa, Artificial sequence
  Synthetic construct
MALPVTALLLPLALLLHAARPEQKLISEEDLDIQMTQTTSSLSASLGDRVTISCRASQDISKYLNWYQQKPDGTVKLLIYHTSRLHSGVPSRFSGSGSGTDYSLTISNLEQEDIATYFCQQGNTLPYTFGGGTKLEITGGGGSGGGGSGGGGSEVKLQESGPGLVAPSQSLSVTCTVSGVSLPDYGVSWIRQPPRKGLEWLGVIWGSETTYYNSALKSRLTIIKDNSKSQVFLKMNSLQTDDTAIYYCAKHYYYGGSYAMDYWGQGTSVTVSSILDYSFGGGAGRDIPPPLIEEACELPECQEDAGNKVCSLQCNNHACGWDGGDCSLNFNDPWKNCTQSLQCWKYFSDGHCDSQCNSAGCLFDGFDCQRAEGQCNPLYDQYCKDHFSDGHCDQGCNSAECEWDGLDCAEHVPERLAAGTLVVVVLMPPEQLRNSSFHFLRELSRVLHTNVVFKRDAHGQQMIFPYYGREEELRKHPIKRAAEGWAAPDALLGQVKASLLPGGSEGGRRRRELDPMDVRGSIVYLEIDNRQCVQASSQCFQSATDVAAFLGALASLGSLNIPYKIEAVQSETVEPPPPAQLHFMYVAAAAFVLLFFVGCGVLLSRSRKVDKRMKLLSSIEQACDICRLKKLKCSKEKPKCAKCLKNNWECRYSPKTKRSPLTRAHLTEVESRLERLEQLFLLIFPREDLDMILKMDSLQDIKALLTGLFVQDNVNKDAVTDRLASVETDMPLTLRQHRISATSSSEESSNKGQRQLTVSAAAGGSGGSGGSDALDDFDLDMLGSDALDDFDLDMLGSDALDDFDLDMLGSDALDDFDLDMLGS

SEQ ID NO: 63 - protein, 825 aa, Artificial sequence
  Synthetic construct
MALPVTALLLPLALLLHAARPEQKLISEEDLDIQMTQTTSSLSASLGDRVTISCRASQDISKYLNWYQQKPDGTVKLLIYHTSRLHSGVPSRFSGSGSGTDYSLTISNLEQEDIATYFCQQGNTLPYTFGGGTKLEITGGGGSGGGGSGGGGSEVKLQESGPGLVAPSQSLSVTCTVSGVSLPDYGVSWIRQPPRKGLEWLGVIWGSETTYYNSALKSRLTIIKDNSKSQVFLKMNSLQTDDTAIYYCAKHYYYGGSYAMDYWGQGTSVTVSSILDYSFGGGAGRDIPPPLIEEACELPECQEDAGNKVCSLQCNNHACGWDGGDCSLNFNDPWKNCTQSLQCWKYFSDGHCDSQCNSAGCLFDGFDCQRAEGQCNPLYDQYCKDHFSDGHCDQGCNSAECEWDGLDCAEHVPERLAAGTLVVVVLMPPEQLRNSSFHFLRELSRVLHTNVVFKRDAHGQQMIFPYYGREEELRKHPIKRAAEGWAAPDALLGQVKASLLPGGSEGGRRRRELDPMDVRGSIVYLEIDNRQCVQASSQCFQSATDVAAFLGALASLGSLNIPYKIEAVQSETVEPPPPAQLHFMYVAAAAFVLLFFVGCGVLLSKRRDKERQAKMKLLSSIEQACDICRLKKLKCSKEKPKCAKCLKNNWECRYSPKTKRSPLTRAHLTEVESRLERLEQLFLLIFPREDLDMILKMDSLQDIKALLTGLFVQDNVNKDAVTDRLASVETDMPLTLRQHRISATSSSEESSNKGQRQLTVSAAAGGSGGSGGSDALDDFDLDMLGSDALDDFDLDMLGSDALDDFDLDMLGSDALDDFDLDMLGS

SEQ ID NO: 64 - protein, 829 aa, Artificial sequence
  Synthetic construct
MALPVTALLLPLALLLHAARPEQKLISEEDLDIQMTQTTSSLSASLGDRVTISCRASQDISKYLNWYQQKPDGTVKLLIYHTSRLHSGVPSRFSGSGSGTDYSLTISNLEQEDIATYFCQQGNTLPYTFGGGTKLEITGGGGSGGGGSGGGGSEVKLQESGPGLVAPSQSLSVTCTVSGVSLPDYGVSWIRQPPRKGLEWLGVIWGSETTYYNSALKSRLTIIKDNSKSQVFLKMNSLQTDDTAIYYCAKHYYYGGSYAMDYWGQGTSVTVSSILDYSFGGGAGRDIPPPLIEEACELPECQEDAGNKVCSLQCNNHACGWDGGDCSLNFNDPWKNCTQSLQCWKYFSDGHCDSQCNSAGCLFDGFDCQRAEGQCNPLYDQYCKDHFSDGHCDQGCNSAECEWDGLDCAEHVPERLAAGTLVVVVLMPPEQLRNSSFHFLRELSRVLHTNVVFKRDAHGQQMIFPYYGREEELRKHPIKRAAEGWAAPDALLGQVKASLLPGGSEGGRRRRELDPMDVRGSIVYLEIDNRQCVQASSQCFQSATDVAAFLGALASLGSLNIPYKIEAVQSETVEPPPPAQLHFMYVAAAAFVLLFFVGCGVLLSKTKKQRKQMHNHLRMKLLSSIEQACDICRLKKLKCSKEKPKCAKCLKNNWECRYSPKTKRSPLTRAHLTEVESRLERLEQLFLLIFPREDLDMILKMDSLQDIKALLTGLFVQDNVNKDAVTDRLASVETDMPLTLRQHRISATSSSEESSNKGQRQLTVSAAAGGSGGSGGSDALDDFDLDMLGSDALDDFDLDMLGSDALDDFDLDMLGSDALDDFDLDMLGS

SEQ ID NO: 65 - protein, 825 aa, Artificial sequence
  Synthetic construct
MALPVTALLLPLALLLHAARPEQKLISEEDLDIQMTQTTSSLSASLGDRVTISCRASQDISKYLNWYQQKPDGTVKLLIYHTSRLHSGVPSRFSGSGSGTDYSLTISNLEQEDIATYFCQQGNTLPYTFGGGTKLEITGGGGSGGGGSGGGGSEVKLQESGPGLVAPSQSLSVTCTVSGVSLPDYGVSWIRQPPRKGLEWLGVIWGSETTYYNSALKSRLTIIKDNSKSQVFLKMNSLQTDDTAIYYCAKHYYYGGSYAMDYWGQGTSVTVSSILDYSFGGGAGRDIPPPLIEEACELPECQEDAGNKVCSLQCNNHACGWDGGDCSLNFNDPWKNCTQSLQCWKYFSDGHCDSQCNSAGCLFDGFDCQRAEGQCNPLYDQYCKDHFSDGHCDQGCNSAECEWDGLDCAEHVPERLAAGTLVVVVLMPPEQLRNSSFHFLRELSRVLHTNVVFKRDAHGQQMIFPYYGREEELRKHPIKRAAEGWAAPDALLGQVKASLLPGGSEGGRRRRELDPMDVRGSIVYLEIDNRQCVQASSQCFQSATDVAAFLGALASLGSLNIPYKIEAVQSETVEPPPPAQLHFMYVAAAAFVLLFFVGCGVLLSKKSKLAKKRKMKLLSSIEQACDICRLKKLKCSKEKPKCAKCLKNNWECRYSPKTKRSPLTRAHLTEVESRLERLEQLFLLIFPREDLDMILKMDSLQDIKALLTGLFVQDNVNKDAVTDRLASVETDMPLTLRQHRISATSSSEESSNKGQRQLTVSAAAGGSGGSGGSDALDDFDLDMLGSDALDDFDLDMLGSDALDDFDLDMLGSDALDDFDLDMLGS

SEQ ID NO: 66 - protein, 827 aa, Artificial sequence
  Synthetic construct
MALPVTALLLPLALLLHAARPEQKLISEEDLDIQMTQTTSSLSASLGDRVTISCRASQDISKYLNWYQQKPDGTVKLLIYHTSRLHSGVPSRFSGSGSGTDYSLTISNLEQEDIATYFCQQGNTLPYTFGGGTKLEITGGGGSGGGGSGGGGSEVKLQESGPGLVAPSQSLSVTCTVSGVSLPDYGVSWIRQPPRKGLEWLGVIWGSETTYYNSALKSRLTIIKDNSKSQVFLKMNSLQTDDTAIYYCAKHYYYGGSYAMDYWGQGTSVTVSSILDYSFGGGAGRDIPPPLIEEACELPECQEDAGNKVCSLQCNNHACGWDGGDCSLNFNDPWKNCTQSLQCWKYFSDGHCDSQCNSAGCLFDGFDCQRAEGQCNPLYDQYCKDHFSDGHCDQGCNSAECEWDGLDCAEHVPERLAAGTLVVVVLMPPEQLRNSSFHFLRELSRVLHTNVVFKRDAHGQQMIFPYYGREEELRKHPIKRAAEGWAAPDALLGQVKASLLPGGSEGGRRRRELDPMDVRGSIVYLEIDNRQCVQASSQCFQSATDVAAFLGALASLGSLNIPYKIEAVQSETVEPPPPAQLHFMYVAAAAFVLLFFVGCGVLLSHPLRKRRKRKKKMKLLSSIEQACDICRLKKLKCSKEKPKCAKCLKNNWECRYSPKTKRSPLTRAHLTEVESRLERLEQLFLLIFPREDLDMILKMDSLQDIKALLTGLFVQDNVNKDAVTDRLASVETDMPLTLRQHRISATSSSEESSNKGQRQLTVSAAAGGSGGSGGSDALDDFDLDMLGSDALDDFDLDMLGSDALDDFDLDMLGSDALDDFDLDMLGS

SEQ ID NO: 67 - protein, 825 aa, Artificial sequence
  Synthetic construct
MALPVTALLLPLALLLHAARPEQKLISEEDLDIQMTQTTSSLSASLGDRVTISCRASQDISKYLNWYQQKPDGTVKLLIYHTSRLHSGVPSRFSGSGSGTDYSLTISNLEQEDIATYFCQQGNTLPYTFGGGTKLEITGGGGSGGGGSGGGGSEVKLQESGPGLVAPSQSLSVTCTVSGVSLPDYGVSWIRQPPRKGLEWLGVIWGSETTYYNSALKSRLTIIKDNSKSQVFLKMNSLQTDDTAIYYCAKHYYYGGSYAMDYWGQGTSVTVSSILDYSFGGGAGRDIPPPLIEEACELPECQEDAGNKVCSLQCNNHACGWDGGDCSLNFNDPWKNCTQSLQCWKYFSDGHCDSQCNSAGCLFDGFDCQRAEGQCNPLYDQYCKDHFSDGHCDQGCNSAECEWDGLDCAEHVPERLAAGTLVVVVLMPPEQLRNSSFHFLRELSRVLHTNVVFKRDAHGQQMIFPYYGREEELRKHPIKRAAEGWAAPDALLGQVKASLLPGGSEGGRRRRELDPMDVRGSIVYLEIDNRQCVQASSQCFQSATDVAAFLGALASLGSLNIPYKIEAVQSETVEPPPPAQLHFMYVAAAAFVLLFFVGCGVLLSRRRSKYSKAKMKLLSSIEQACDICRLKKLKCSKEKPKCAKCLKNNWECRYSPKTKRSPLTRAHLTEVESRLERLEQLFLLIFPREDLDMILKMDSLQDIKALLTGLFVQDNVNKDAVTDRLASVETDMPLTLRQHRISATSSSEESSNKGQRQLTVSAAAGGSGGSGGSDALDDFDLDMLGSDALDDFDLDMLGSDALDDFDLDMLGSDALDDFDLDMLGS

SEQ ID NO: 68 - protein, 825 aa, Artificial sequence
  Synthetic construct
MALPVTALLLPLALLLHAARPEQKLISEEDLDIQMTQTTSSLSASLGDRVTISCRASQDISKYLNWYQQKPDGTVKLLIYHTSRLHSGVPSRFSGSGSGTDYSLTISNLEQEDIATYFCQQGNTLPYTFGGGTKLEITGGGGSGGGGSGGGGSEVKLQESGPGLVAPSQSLSVTCTVSGVSLPDYGVSWIRQPPRKGLEWLGVIWGSETTYYNSALKSRLTIIKDNSKSQVFLKMNSLQTDDTAIYYCAKHYYYGGSYAMDYWGQGTSVTVSSILDYSFGGGAGRDIPPPLIEEACELPECQEDAGNKVCSLQCNNHACGWDGGDCSLNFNDPWKNCTQSLQCWKYFSDGHCDSQCNSAGCLFDGFDCQRAEGQCNPLYDQYCKDHFSDGHCDQGCNSAECEWDGLDCAEHVPERLAAGTLVVVVLMPPEQLRNSSFHFLRELSRVLHTNVVFKRDAHGQQMIFPYYGREEELRKHPIKRAAEGWAAPDALLGQVKASLLPGGSEGGRRRRELDPMDVRGSIVYLEIDNRQCVQASSQCFQSATDVAAFLGALASLGSLNIPYKIEAVQSETVEPPPPAQLHFMYVAAAAFVLLFFVGCGVLLSHRRCKHRTGKMKLLSSIEQACDICRLKKLKCSKEKPKCAKCLKNNWECRYSPKTKRSPLTRAHLTEVESRLERLEQLFLLIFPREDLDMILKMDSLQDIKALLTGLFVQDNVNKDAVTDRLASVETDMPLTLRQHRISATSSSEESSNKGQRQLTVSAAAGGSGGSGGSDALDDFDLDMLGSDALDDFDLDMLGSDALDDFDLDMLGSDALDDFDLDMLGS

SEQ ID NO: 69 - protein, 823 aa, Artificial sequence
  Synthetic construct
MALPVTALLLPLALLLHAARPEQKLISEEDLDIQMTQTTSSLSASLGDRVTISCRASQDISKYLNWYQQKPDGTVKLLIYHTSRLHSGVPSRFSGSGSGTDYSLTISNLEQEDIATYFCQQGNTLPYTFGGGTKLEITGGGGSGGGGSGGGGSEVKLQESGPGLVAPSQSLSVTCTVSGVSLPDYGVSWIRQPPRKGLEWLGVIWGSETTYYNSALKSRLTIIKDNSKSQVFLKMNSLQTDDTAIYYCAKHYYYGGSYAMDYWGQGTSVTVSSILDYSFGGGAGRDIPPPLIEEACELPECQEDAGNKVCSLQCNNHACGWDGGDCSLNFNDPWKNCTQSLQCWKYFSDGHCDSQCNSAGCLFDGFDCQRAEGQCNPLYDQYCKDHFSDGHCDQGCNSAECEWDGLDCAEHVPERLAAGTLVVVVLMPPEQLRNSSFHFLRELSRVLHTNVVFKRDAHGQQMIFPYYGREEELRKHPIKRAAEGWAAPDALLGQVKASLLPGGSEGGRRRRELDPMDVRGSIVYLEIDNRQCVQASSQCFQSATDVAAFLGALASLGSLNIPYKIEAVQSETVEPPPPAQLHFMYVAAAAFVLLFFVGCGVLLSKSKRREKKMKLLSSIEQACDICRLKKLKCSKEKPKCAKCLKNNWECRYSPKTKRSPLTRAHLTEVESRLERLEQLFLLIFPREDLDMILKMDSLQDIKALLTGLFVQDNVNKDAVTDRLASVETDMPLTLRQHRISATSSSEESSNKGQRQLTVSAAAGGSGGSGGSDALDDFDLDMLGSDALDDFDLDMLGSDALDDFDLDMLGSDALDDFDLDMLGS

SEQ ID NO: 70 - protein, 825 aa, Artificial sequence
  Synthetic construct
MALPVTALLLPLALLLHAARPEQKLISEEDLDIQMTQTTSSLSASLGDRVTISCRASQDISKYLNWYQQKPDGTVKLLIYHTSRLHSGVPSRFSGSGSGTDYSLTISNLEQEDIATYFCQQGNTLPYTFGGGTKLEITGGGGSGGGGSGGGGSEVKLQESGPGLVAPSQSLSVTCTVSGVSLPDYGVSWIRQPPRKGLEWLGVIWGSETTYYNSALKSRLTIIKDNSKSQVFLKMNSLQTDDTAIYYCAKHYYYGGSYAMDYWGQGTSVTVSSILDYSFGGGAGRDIPPPLIEEACELPECQEDAGNKVCSLQCNNHACGWDGGDCSLNFNDPWKNCTQSLQCWKYFSDGHCDSQCNSAGCLFDGFDCQRAEGQCNPLYDQYCKDHFSDGHCDQGCNSAECEWDGLDCAEHVPERLAAGTLVVVVLMPPEQLRNSSFHFLRELSRVLHTNVVFKRDAHGQQMIFPYYGREEELRKHPIKRAAEGWAAPDALLGQVKASLLPGGSEGGRRRRELDPMDVRGSIVYLEIDNRQCVQASSQCFQSATDVAAFLGALASLGSLNIPYKIEAVQSETVEPPPPAQLHFMYVAAAAFVLLFFVGCGVLLSKCVRRKKEQKMKLLSSIEQACDICRLKKLKCSKEKPKCAKCLKNNWECRYSPKTKRSPLTRAHLTEVESRLERLEQLFLLIFPREDLDMILKMDSLQDIKALLTGLFVQDNVNKDAVTDRLASVETDMPLTLRQHRISATSSSEESSNKGQRQLTVSAAAGGSGGSGGSDALDDFDLDMLGSDALDDFDLDMLGSDALDDFDLDMLGSDALDDFDLDMLGS

SEQ ID NO: 71 - protein, 824 aa, Artificial sequence
  Synthetic construct
MALPVTALLLPLALLLHAARPEQKLISEEDLDIQMTQTTSSLSASLGDRVTISCRASQDISKYLNWYQQKPDGTVKLLIYHTSRLHSGVPSRFSGSGSGTDYSLTISNLEQEDIATYFCQQGNTLPYTFGGGTKLEITGGGGSGGGGSGGGGSEVKLQESGPGLVAPSQSLSVTCTVSGVSLPDYGVSWIRQPPRKGLEWLGVIWGSETTYYNSALKSRLTIIKDNSKSQVFLKMNSLQTDDTAIYYCAKHYYYGGSYAMDYWGQGTSVTVSSILDYSFGGGAGRDIPPPLIEEACELPECQEDAGNKVCSLQCNNHACGWDGGDCSLNFNDPWKNCTQSLQCWKYFSDGHCDSQCNSAGCLFDGFDCQRAEGQCNPLYDQYCKDHFSDGHCDQGCNSAECEWDGLDCAEHVPERLAAGTLVVVVLMPPEQLRNSSFHFLRELSRVLHTNVVFKRDAHGQQMIFPYYGREEELRKHPIKRAAEGWAAPDALLGQVKASLLPGGSEGGRRRRELDPMDVRGSIVYLEIDNRQCVQASSQCFQSATDVAAFLGALASLGSLNIPYKIEAVQSETVEPPPPAQLHFMYVAAAAFVLLFFVGCGVLLSKCWRSHKQRMKLLSSIEQACDICRLKKLKCSKEKPKCAKCLKNNWECRYSPKTKRSPLTRAHLTEVESRLERLEQLFLLIFPREDLDMILKMDSLQDIKALLTGLFVQDNVNKDAVTDRLASVETDMPLTLRQHRISATSSSEESSNKGQRQLTVSAAAGGSGGSGGSDALDDFDLDMLGSDALDDFDLDMLGSDALDDFDLDMLGSDALDDFDLDMLGS

SEQ ID NO: 72 - protein, 825 aa, Artificial sequence
  Synthetic construct
MALPVTALLLPLALLLHAARPEQKLISEEDLDIQMTQTTSSLSASLGDRVTISCRASQDISKYLNWYQQKPDGTVKLLIYHTSRLHSGVPSRFSGSGSGTDYSLTISNLEQEDIATYFCQQGNTLPYTFGGGTKLEITGGGGSGGGGSGGGGSEVKLQESGPGLVAPSQSLSVTCTVSGVSLPDYGVSWIRQPPRKGLEWLGVIWGSETTYYNSALKSRLTIIKDNSKSQVFLKMNSLQTDDTAIYYCAKHYYYGGSYAMDYWGQGTSVTVSSILDYSFGGGAGRDIPPPLIEEACELPECQEDAGNKVCSLQCNNHACGWDGGDCSLNFNDPWKNCTQSLQCWKYFSDGHCDSQCNSAGCLFDGFDCQRAEGQCNPLYDQYCKDHFSDGHCDQGCNSAECEWDGLDCAEHVPERLAAGTLVVVVLMPPEQLRNSSFHFLRELSRVLHTNVVFKRDAHGQQMIFPYYGREEELRKHPIKRAAEGWAAPDALLGQVKASLLPGGSEGGRRRRELDPMDVRGSIVYLEIDNRQCVQASSQCFQSATDVAAFLGALASLGSLNIPYKIEAVQSETVEPPPPAQLHFMYVAAAAFVLLFFVGCGVLLSKKRKLAKKRKMKLLSSIEQACDICRLKKLKCSKEKPKCAKCLKNNWECRYSPKTKRSPLTRAHLTEVESRLERLEQLFLLIFPREDLDMILKMDSLQDIKALLTGLFVQDNVNKDAVTDRLASVETDMPLTLRQHRISATSSSEESSNKGQRQLTVSAAAGGSGGSGGSDALDDFDLDMLGSDALDDFDLDMLGSDALDDFDLDMLGSDALDDFDLDMLGS

SEQ ID NO: 73 - protein, 821 aa, Artificial sequence
  Synthetic construct
MALPVTALLLPLALLLHAARPEQKLISEEDLDIQMTQTTSSLSASLGDRVTISCRASQDISKYLNWYQQKPDGTVKLLIYHTSRLHSGVPSRFSGSGSGTDYSLTISNLEQEDIATYFCQQGNTLPYTFGGGTKLEITGGGGSGGGGSGGGGSEVKLQESGPGLVAPSQSLSVTCTVSGVSLPDYGVSWIRQPPRKGLEWLGVIWGSETTYYNSALKSRLTIIKDNSKSQVFLKMNSLQTDDTAIYYCAKHYYYGGSYAMDYWGQGTSVTVSSILDYSFGGGAGRDIPPPLIEEACELPECQEDAGNKVCSLQCNNHACGWDGGDCSLNFNDPWKNCTQSLQCWKYFSDGHCDSQCNSAGCLFDGFDCQRAEGQCNPLYDQYCKDHFSDGHCDQGCNSAECEWDGLDCAEHVPERLAAGTLVVVVLMPPEQLRNSSFHFLRELSRVLHTNVVFKRDAHGQQMIFPYYGREEELRKHPIKRAAEGWAAPDALLGQVKASLLPGGSEGGRRRRELDPMDVRGSIVYLEIDNRQCVQASSQCFQSATDVAAFLGALASLGSLNIPYKIEAVQSETVEPPPPAQLHFMYVAAAAFVLLFFVGCGVLLSKRKRKHMKLLSSIEQACDICRLKKLKCSKEKPKCAKCLKNNWECRYSPKTKRSPLTRAHLTEVESRLERLEQLFLLIFPREDLDMILKMDSLQDIKALLTGLFVQDNVNKDAVTDRLASVETDMPLTLRQHRISATSSSEESSNKGQRQLTVSAAAGGSGGSGGSDALDDFDLDMLGSDALDDFDLDMLGSDALDDFDLDMLGSDALDDFDLDMLGS

SEQ ID NO: 74 - protein, 821 aa, Artificial sequence
  Synthetic construct
MALPVTALLLPLALLLHAARPEQKLISEEDLDIQMTQTTSSLSASLGDRVTISCRASQDISKYLNWYQQKPDGTVKLLIYHTSRLHSGVPSRFSGSGSGTDYSLTISNLEQEDIATYFCQQGNTLPYTFGGGTKLEITGGGGSGGGGSGGGGSEVKLQESGPGLVAPSQSLSVTCTVSGVSLPDYGVSWIRQPPRKGLEWLGVIWGSETTYYNSALKSRLTIIKDNSKSQVFLKMNSLQTDDTAIYYCAKHYYYGGSYAMDYWGQGTSVTVSSILDYSFGGGAGRDIPPPLIEEACELPECQEDAGNKVCSLQCNNHACGWDGGDCSLNFNDPWKNCTQSLQCWKYFSDGHCDSQCNSAGCLFDGFDCQRAEGQCNPLYDQYCKDHFSDGHCDQGCNSAECEWDGLDCAEHVPERLAAGTLVVVVLMPPEQLRNSSFHFLRELSRVLHTNVVFKRDAHGQQMIFPYYGREEELRKHPIKRAAEGWAAPDALLGQVKASLLPGGSEGGRRRRELDPMDVRGSIVYLEIDNRQCVQASSQCFQSATDVAAFLGALASLGSLNIPYKIEAVQSETVEPPPPAQLHFMYVAAAAFVLLFFVGCGVLLSRRKREHMKLLSSIEQACDICRLKKLKCSKEKPKCAKCLKNNWECRYSPKTKRSPLTRAHLTEVESRLERLEQLFLLIFPREDLDMILKMDSLQDIKALLTGLFVQDNVNKDAVTDRLASVETDMPLTLRQHRISATSSSEESSNKGQRQLTVSAAAGGSGGSGGSDALDDFDLDMLGSDALDDFDLDMLGSDALDDFDLDMLGSDALDDFDLDMLGS

SEQ ID NO: 75 - protein, 822 aa, Artificial sequence
  Synthetic construct
MALPVTALLLPLALLLHAARPEQKLISEEDLDIQMTQTTSSLSASLGDRVTISCRASQDISKYLNWYQQKPDGTVKLLIYHTSRLHSGVPSRFSGSGSGTDYSLTISNLEQEDIATYFCQQGNTLPYTFGGGTKLEITGGGGSGGGGSGGGGSEVKLQESGPGLVAPSQSLSVTCTVSGVSLPDYGVSWIRQPPRKGLEWLGVIWGSETTYYNSALKSRLTIIKDNSKSQVFLKMNSLQTDDTAIYYCAKHYYYGGSYAMDYWGQGTSVTVSSILDYSFGGGAGRDIPPPLIEEACELPECQEDAGNKVCSLQCNNHACGWDGGDCSLNFNDPWKNCTQSLQCWKYFSDGHCDSQCNSAGCLFDGFDCQRAEGQCNPLYDQYCKDHFSDGHCDQGCNSAECEWDGLDCAEHVPERLAAGTLVVVVLMPPEQLRNSSFHFLRELSRVLHTNVVFKRDAHGQQMIFPYYGREEELRKHPIKRAAEGWAAPDALLGQVKASLLPGGSEGGRRRRELDPMDVRGSIVYLEIDNRQCVQASSQCFQSATDVAAFLGALASLGSLNIPYKIEAVQSETVEPPPPAQLHFMYVAAAAFVLLFFVGCGVLLSRRRRREHMKLLSSIEQACDICRLKKLKCSKEKPKCAKCLKNNWECRYSPKTKRSPLTRAHLTEVESRLERLEQLFLLIFPREDLDMILKMDSLQDIKALLTGLFVQDNVNKDAVTDRLASVETDMPLTLRQHRISATSSSEESSNKGQRQLTVSAAAGGSGGSGGSDALDDFDLDMLGSDALDDFDLDMLGSDALDDFDLDMLGSDALDDFDLDMLGS

SEQ ID NO: 76 - protein, 542 aa, Artificial sequence
  Synthetic construct
MALPVTALLLPLALLLHAARPEQKLISEEDLDIQMTQTTSSLSASLGDRVTISCRASQDISKYLNWYQQKPDGTVKLLIYHTSRLHSGVPSRFSGSGSGTDYSLTISNLEQEDIATYFCQQGNTLPYTFGGGTKLEITGGGGSGGGGSGGGGSEVKLQESGPGLVAPSQSLSVTCTVSGVSLPDYGVSWIRQPPRKGLEWLGVIWGSETTYYNSALKSRLTIIKDNSKSQVFLKMNSLQTDDTAIYYCAKHYYYGGSYAMDYWGQGTSVTVSSILDYSFGGGAGRDIPPPLIEETVEPPPPAQLHFMYVAAAAFVLLFFVGCGVLLSKRRRMKLLSSIEQACDICRLKKLKCSKEKPKCAKCLKNNWECRYSPKTKRSPLTRAHLTEVESRLERLEQLFLLIFPREDLDMILKMDSLQDIKALLTGLFVQDNVNKDAVTDRLASVETDMPLTLRQHRISATSSSEESSNKGQRQLTVSAAAGGSGGSGGSDALDDFDLDMLGSDALDDFDLDMLGSDALDDFDLDMLGSDALDDFDLDMLGS

SEQ ID NO: 77 - protein, 545 aa, Artificial sequence
  Synthetic construct
MALPVTALLLPLALLLHAARPEQKLISEEDLDIQMTQTTSSLSASLGDRVTISCRASQDISKYLNWYQQKPDGTVKLLIYHTSRLHSGVPSRFSGSGSGTDYSLTISNLEQEDIATYFCQQGNTLPYTFGGGTKLEITGGGGSGGGGSGGGGSEVKLQESGPGLVAPSQSLSVTCTVSGVSLPDYGVSWIRQPPRKGLEWLGVIWGSETTYYNSALKSRLTIIKDNSKSQVFLKMNSLQTDDTAIYYCAKHYYYGGSYAMDYWGQGTSVTVSSILDYSFGGGAGRDIPPPLIEETVEPPPPAQLHFMYVAAAAFVLLFFVGCGVLLSRKKRKGKMKLLSSIEQACDICRLKKLKCSKEKPKCAKCLKNNWECRYSPKTKRSPLTRAHLTEVESRLERLEQLFLLIFPREDLDMILKMDSLQDIKALLTGLFVQDNVNKDAVTDRLASVETDMPLTLRQHRISATSSSEESSNKGQRQLTVSAAAGGSGGSGGSDALDDFDLDMLGSDALDDFDLDMLGSDALDDFDLDMLGSDALDDFDLDMLGS

SEQ ID NO: 78 - protein, 544 aa, Artificial sequence
  Synthetic construct
MALPVTALLLPLALLLHAARPEQKLISEEDLDIQMTQTTSSLSASLGDRVTISCRASQDISKYLNWYQQKPDGTVKLLIYHTSRLHSGVPSRFSGSGSGTDYSLTISNLEQEDIATYFCQQGNTLPYTFGGGTKLEITGGGGSGGGGSGGGGSEVKLQESGPGLVAPSQSLSVTCTVSGVSLPDYGVSWIRQPPRKGLEWLGVIWGSETTYYNSALKSRLTIIKDNSKSQVFLKMNSLQTDDTAIYYCAKHYYYGGSYAMDYWGQGTSVTVSSILDYSFGGGAGRDIPPPLIEETVEPPPPAQLHFMYVAAAAFVLLFFVGCGVLLSKQQRIKMKLLSSIEQACDICRLKKLKCSKEKPKCAKCLKNNWECRYSPKTKRSPLTRAHLTEVESRLERLEQLFLLIFPREDLDMILKMDSLQDIKALLTGLFVQDNVNKDAVTDRLASVETDMPLTLRQHRISATSSSEESSNKGQRQLTVSAAAGGSGGSGGSDALDDFDLDMLGSDALDDFDLDMLGSDALDDFDLDMLGSDALDDFDLDMLGS

SEQ ID NO: 79 - protein, 544 aa, Artificial sequence
  Synthetic construct
MALPVTALLLPLALLLHAARPEQKLISEEDLDIQMTQTTSSLSASLGDRVTISCRASQDISKYLNWYQQKPDGTVKLLIYHTSRLHSGVPSRFSGSGSGTDYSLTISNLEQEDIATYFCQQGNTLPYTFGGGTKLEITGGGGSGGGGSGGGGSEVKLQESGPGLVAPSQSLSVTCTVSGVSLPDYGVSWIRQPPRKGLEWLGVIWGSETTYYNSALKSRLTIIKDNSKSQVFLKMNSLQTDDTAIYYCAKHYYYGGSYAMDYWGQGTSVTVSSILDYSFGGGAGRDIPPPLIEETVEPPPPAQLHFMYVAAAAFVLLFFVGCGVLLSKRKRTHMKLLSSIEQACDICRLKKLKCSKEKPKCAKCLKNNWECRYSPKTKRSPLTRAHLTEVESRLERLEQLFLLIFPREDLDMILKMDSLQDIKALLTGLFVQDNVNKDAVTDRLASVETDMPLTLRQHRISATSSSEESSNKGQRQLTVSAAAGGSGGSGGSDALDDFDLDMLGSDALDDFDLDMLGSDALDDFDLDMLGSDALDDFDLDMLGS

SEQ ID NO: 80 - protein, 546 aa, Artificial sequence
  Synthetic construct
MALPVTALLLPLALLLHAARPEQKLISEEDLDIQMTQTTSSLSASLGDRVTISCRASQDISKYLNWYQQKPDGTVKLLIYHTSRLHSGVPSRFSGSGSGTDYSLTISNLEQEDIATYFCQQGNTLPYTFGGGTKLEITGGGGSGGGGSGGGGSEVKLQESGPGLVAPSQSLSVTCTVSGVSLPDYGVSWIRQPPRKGLEWLGVIWGSETTYYNSALKSRLTIIKDNSKSQVFLKMNSLQTDDTAIYYCAKHYYYGGSYAMDYWGQGTSVTVSSILDYSFGGGAGRDIPPPLIEETVEPPPPAQLHFMYVAAAAFVLLFFVGCGVLLSKKGRRSYKMKLLSSIEQACDICRLKKLKCSKEKPKCAKCLKNNWECRYSPKTKRSPLTRAHLTEVESRLERLEQLFLLIFPREDLDMILKMDSLQDIKALLTGLFVQDNVNKDAVTDRLASVETDMPLTLRQHRISATSSSEESSNKGQRQLTVSAAAGGSGGSGGSDALDDFDLDMLGSDALDDFDLDMLGSDALDDFDLDMLGSDALDDFDLDMLGS

SEQ ID NO: 81 - protein, 552 aa, Artificial sequence
  Synthetic construct
MALPVTALLLPLALLLHAARPEQKLISEEDLDIQMTQTTSSLSASLGDRVTISCRASQDISKYLNWYQQKPDGTVKLLIYHTSRLHSGVPSRFSGSGSGTDYSLTISNLEQEDIATYFCQQGNTLPYTFGGGTKLEITGGGGSGGGGSGGGGSEVKLQESGPGLVAPSQSLSVTCTVSGVSLPDYGVSWIRQPPRKGLEWLGVIWGSETTYYNSALKSRLTIIKDNSKSQVFLKMNSLQTDDTAIYYCAKHYYYGGSYAMDYWGQGTSVTVSSILDYSFGGGAGRDIPPPLIEETVEPPPPAQLHFMYVAAAAFVLLFFVGCGVLLSKTKKQRKKLHDRLRMKLLSSIEQACDICRLKKLKCSKEKPKCAKCLKNNWECRYSPKTKRSPLTRAHLTEVESRLERLEQLFLLIFPREDLDMILKMDSLQDIKALLTGLFVQDNVNKDAVTDRLASVETDMPLTLRQHRISATSSSEESSNKGQRQLTVSAAAGGSGGSGGSDALDDFDLDMLGSDALDDFDLDMLGSDALDDFDLDMLGSDALDDFDLDMLGS

SEQ ID NO: 82 - protein, 549 aa, Artificial sequence
  Synthetic construct
MALPVTALLLPLALLLHAARPEQKLISEEDLDIQMTQTTSSLSASLGDRVTISCRASQDISKYLNWYQQKPDGTVKLLIYHTSRLHSGVPSRFSGSGSGTDYSLTISNLEQEDIATYFCQQGNTLPYTFGGGTKLEITGGGGSGGGGSGGGGSEVKLQESGPGLVAPSQSLSVTCTVSGVSLPDYGVSWIRQPPRKGLEWLGVIWGSETTYYNSALKSRLTIIKDNSKSQVFLKMNSLQTDDTAIYYCAKHYYYGGSYAMDYWGQGTSVTVSSILDYSFGGGAGRDIPPPLIEETVEPPPPAQLHFMYVAAAAFVLLFFVGCGVLLSKRKRRTKTIRRMKLLSSIEQACDICRLKKLKCSKEKPKCAKCLKNNWECRYSPKTKRSPLTRAHLTEVESRLERLEQLFLLIFPREDLDMILKMDSLQDIKALLTGLFVQDNVNKDAVTDRLASVETDMPLTLRQHRISATSSSEESSNKGQRQLTVSAAAGGSGGSGGSDALDDFDLDMLGSDALDDFDLDMLGSDALDDFDLDMLGSDALDDFDLDMLGS

SEQ ID NO: 83 - protein, 552 aa, Artificial sequence
  Synthetic construct
MALPVTALLLPLALLLHAARPEQKLISEEDLDIQMTQTTSSLSASLGDRVTISCRASQDISKYLNWYQQKPDGTVKLLIYHTSRLHSGVPSRFSGSGSGTDYSLTISNLEQEDIATYFCQQGNTLPYTFGGGTKLEITGGGGSGGGGSGGGGSEVKLQESGPGLVAPSQSLSVTCTVSGVSLPDYGVSWIRQPPRKGLEWLGVIWGSETTYYNSALKSRLTIIKDNSKSQVFLKMNSLQTDDTAIYYCAKHYYYGGSYAMDYWGQGTSVTVSSILDYSFGGGAGRDIPPPLIEETVEPPPPAQLHFMYVAAAAFVLLFFVGCGVLLSRKRRKERERSRLPRMKLLSSIEQACDICRLKKLKCSKEKPKCAKCLKNNWECRYSPKTKRSPLTRAHLTEVESRLERLEQLFLLIFPREDLDMILKMDSLQDIKALLTGLFVQDNVNKDAVTDRLASVETDMPLTLRQHRISATSSSEESSNKGQRQLTVSAAAGGSGGSGGSDALDDFDLDMLGSDALDDFDLDMLGSDALDDFDLDMLGSDALDDFDLDMLGS

SEQ ID NO: 84 - protein, 548 aa, Artificial sequence
  Synthetic construct
MALPVTALLLPLALLLHAARPEQKLISEEDLDIQMTQTTSSLSASLGDRVTISCRASQDISKYLNWYQQKPDGTVKLLIYHTSRLHSGVPSRFSGSGSGTDYSLTISNLEQEDIATYFCQQGNTLPYTFGGGTKLEITGGGGSGGGGSGGGGSEVKLQESGPGLVAPSQSLSVTCTVSGVSLPDYGVSWIRQPPRKGLEWLGVIWGSETTYYNSALKSRLTIIKDNSKSQVFLKMNSLQTDDTAIYYCAKHYYYGGSYAMDYWGQGTSVTVSSILDYSFGGGAGRDIPPPLIEETVEPPPPAQLHFMYVAAAAFVLLFFVGCGVLLSRKKRMAKYEKMKLLSSIEQACDICRLKKLKCSKEKPKCAKCLKNNWECRYSPKTKRSPLTRAHLTEVESRLERLEQLFLLIFPREDLDMILKMDSLQDIKALLTGLFVQDNVNKDAVTDRLASVETDMPLTLRQHRISATSSSEESSNKGQRQLTVSAAAGGSGGSGGSDALDDFDLDMLGSDALDDFDLDMLGSDALDDFDLDMLGSDALDDFDLDMLGS

SEQ ID NO: 85 - protein, 552 aa, Artificial sequence
  Synthetic construct
MALPVTALLLPLALLLHAARPEQKLISEEDLDIQMTQTTSSLSASLGDRVTISCRASQDISKYLNWYQQKPDGTVKLLIYHTSRLHSGVPSRFSGSGSGTDYSLTISNLEQEDIATYFCQQGNTLPYTFGGGTKLEITGGGGSGGGGSGGGGSEVKLQESGPGLVAPSQSLSVTCTVSGVSLPDYGVSWIRQPPRKGLEWLGVIWGSETTYYNSALKSRLTIIKDNSKSQVFLKMNSLQTDDTAIYYCAKHYYYGGSYAMDYWGQGTSVTVSSILDYSFGGGAGRDIPPPLIEETVEPPPPAQLHFMYVAAAAFVLLFFVGCGVLLSKTKKQRKQMHNHLRMKLLSSIEQACDICRLKKLKCSKEKPKCAKCLKNNWECRYSPKTKRSPLTRAHLTEVESRLERLEQLFLLIFPREDLDMILKMDSLQDIKALLTGLFVQDNVNKDAVTDRLASVETDMPLTLRQHRISATSSSEESSNKGQRQLTVSAAAGGSGGSGGSDALDDFDLDMLGSDALDDFDLDMLGSDALDDFDLDMLGSDALDDFDLDMLGS

SEQ ID NO: 86 - protein, 548 aa, Artificial sequence
  Synthetic construct
MALPVTALLLPLALLLHAARPEQKLISEEDLDIQMTQTTSSLSASLGDRVTISCRASQDISKYLNWYQQKPDGTVKLLIYHTSRLHSGVPSRFSGSGSGTDYSLTISNLEQEDIATYFCQQGNTLPYTFGGGTKLEITGGGGSGGGGSGGGGSEVKLQESGPGLVAPSQSLSVTCTVSGVSLPDYGVSWIRQPPRKGLEWLGVIWGSETTYYNSALKSRLTIIKDNSKSQVFLKMNSLQTDDTAIYYCAKHYYYGGSYAMDYWGQGTSVTVSSILDYSFGGGAGRDIPPPLIEETVEPPPPAQLHFMYVAAAAFVLLFFVGCGVLLSKKSKLAKKRKMKLLSSIEQACDICRLKKLKCSKEKPKCAKCLKNNWECRYSPKTKRSPLTRAHLTEVESRLERLEQLFLLIFPREDLDMILKMDSLQDIKALLTGLFVQDNVNKDAVTDRLASVETDMPLTLRQHRISATSSSEESSNKGQRQLTVSAAAGGSGGSGGSDALDDFDLDMLGSDALDDFDLDMLGSDALDDFDLDMLGSDALDDFDLDMLGS

SEQ ID NO: 87 - protein, 548 aa, Artificial sequence
  Synthetic construct
MALPVTALLLPLALLLHAARPEQKLISEEDLDIQMTQTTSSLSASLGDRVTISCRASQDISKYLNWYQQKPDGTVKLLIYHTSRLHSGVPSRFSGSGSGTDYSLTISNLEQEDIATYFCQQGNTLPYTFGGGTKLEITGGGGSGGGGSGGGGSEVKLQESGPGLVAPSQSLSVTCTVSGVSLPDYGVSWIRQPPRKGLEWLGVIWGSETTYYNSALKSRLTIIKDNSKSQVFLKMNSLQTDDTAIYYCAKHYYYGGSYAMDYWGQGTSVTVSSILDYSFGGGAGRDIPPPLIEETVEPPPPAQLHFMYVAAAAFVLLFFVGCGVLLSKKRKLAKKRKMKLLSSIEQACDICRLKKLKCSKEKPKCAKCLKNNWECRYSPKTKRSPLTRAHLTEVESRLERLEQLFLLIFPREDLDMILKMDSLQDIKALLTGLFVQDNVNKDAVTDRLASVETDMPLTLRQHRISATSSSEESSNKGQRQLTVSAAAGGSGGSGGSDALDDFDLDMLGSDALDDFDLDMLGSDALDDFDLDMLGSDALDDFDLDMLGS

SEQ ID NO: 88 - protein, 537 aa, Artificial sequence
  Synthetic construct
MALPVTALLLPLALLLHAARPEQKLISEEDLDIQMTQTTSSLSASLGDRVTISCRASQDISKYLNWYQQKPDGTVKLLIYHTSRLHSGVPSRFSGSGSGTDYSLTISNLEQEDIATYFCQQGNTLPYTFGGGTKLEITGGGGSGGGGSGGGGSEVKLQESGPGLVAPSQSLSVTCTVSGVSLPDYGVSWIRQPPRKGLEWLGVIWGSETTYYNSALKSRLTIIKDNSKSQVFLKMNSLQTDDTAIYYCAKHYYYGGSYAMDYWGQGTSVTVSSTTTPAPRPPTPAPTIASQPLSLRPEACFMYVAAAAFVLLFFVGCGVLLSKRRRMKLLSSIEQACDICRLKKLKCSKEKPKCAKCLKNNWECRYSPKTKRSPLTRAHLTEVESRLERLEQLFLLIFPREDLDMILKMDSLQDIKALLTGLFVQDNVNKDAVTDRLASVETDMPLTLRQHRISATSSSEESSNKGQRQLTVSAAAGGSGGSGGSDALDDFDLDMLGSDALDDFDLDMLGSDALDDFDLDMLGSDALDDFDLDMLGS

SEQ ID NO: 89 - protein, 540 aa, Artificial sequence
  Synthetic construct
MALPVTALLLPLALLLHAARPEQKLISEEDLDIQMTQTTSSLSASLGDRVTISCRASQDISKYLNWYQQKPDGTVKLLIYHTSRLHSGVPSRFSGSGSGTDYSLTISNLEQEDIATYFCQQGNTLPYTFGGGTKLEITGGGGSGGGGSGGGGSEVKLQESGPGLVAPSQSLSVTCTVSGVSLPDYGVSWIRQPPRKGLEWLGVIWGSETTYYNSALKSRLTIIKDNSKSQVFLKMNSLQTDDTAIYYCAKHYYYGGSYAMDYWGQGTSVTVSSTTTPAPRPPTPAPTIASQPLSLRPEACFMYVAAAAFVLLFFVGCGVLLSRKKRKGKMKLLSSIEQACDICRLKKLKCSKEKPKCAKCLKNNWECRYSPKTKRSPLTRAHLTEVESRLERLEQLFLLIFPREDLDMILKMDSLQDIKALLTGLFVQDNVNKDAVTDRLASVETDMPLTLRQHRISATSSSEESSNKGQRQLTVSAAAGGSGGSGGSDALDDFDLDMLGSDALDDFDLDMLGSDALDDFDLDMLGSDALDDFDLDMLGS

SEQ ID NO: 90 - protein, 539 aa, Artificial sequence
  Synthetic construct
MALPVTALLLPLALLLHAARPEQKLISEEDLDIQMTQTTSSLSASLGDRVTISCRASQDISKYLNWYQQKPDGTVKLLIYHTSRLHSGVPSRFSGSGSGTDYSLTISNLEQEDIATYFCQQGNTLPYTFGGGTKLEITGGGGSGGGGSGGGGSEVKLQESGPGLVAPSQSLSVTCTVSGVSLPDYGVSWIRQPPRKGLEWLGVIWGSETTYYNSALKSRLTIIKDNSKSQVFLKMNSLQTDDTAIYYCAKHYYYGGSYAMDYWGQGTSVTVSSTTTPAPRPPTPAPTIASQPLSLRPEACFMYVAAAAFVLLFFVGCGVLLSKQQRIKMKLLSSIEQACDICRLKKLKCSKEKPKCAKCLKNNWECRYSPKTKRSPLTRAHLTEVESRLERLEQLFLLIFPREDLDMILKMDSLQDIKALLTGLFVQDNVNKDAVTDRLASVETDMPLTLRQHRISATSSSEESSNKGQRQLTVSAAAGGSGGSGGSDALDDFDLDMLGSDALDDFDLDMLGSDALDDFDLDMLGSDALDDFDLDMLGS

SEQ ID NO: 91 - protein, 539 aa, Artificial sequence
  Synthetic construct
MALPVTALLLPLALLLHAARPEQKLISEEDLDIQMTQTTSSLSASLGDRVTISCRASQDISKYLNWYQQKPDGTVKLLIYHTSRLHSGVPSRFSGSGSGTDYSLTISNLEQEDIATYFCQQGNTLPYTFGGGTKLEITGGGGSGGGGSGGGGSEVKLQESGPGLVAPSQSLSVTCTVSGVSLPDYGVSWIRQPPRKGLEWLGVIWGSETTYYNSALKSRLTIIKDNSKSQVFLKMNSLQTDDTAIYYCAKHYYYGGSYAMDYWGQGTSVTVSSTTTPAPRPPTPAPTIASQPLSLRPEACFMYVAAAAFVLLFFVGCGVLLSKRKRTHMKLLSSIEQACDICRLKKLKCSKEKPKCAKCLKNNWECRYSPKTKRSPLTRAHLTEVESRLERLEQLFLLIFPREDLDMILKMDSLQDIKALLTGLFVQDNVNKDAVTDRLASVETDMPLTLRQHRISATSSSEESSNKGQRQLTVSAAAGGSGGSGGSDALDDFDLDMLGSDALDDFDLDMLGSDALDDFDLDMLGSDALDDFDLDMLGS

SEQ ID NO: 92 - protein, 541 aa, Artificial sequence
  Synthetic construct
MALPVTALLLPLALLLHAARPEQKLISEEDLDIQMTQTTSSLSASLGDRVTISCRASQDISKYLNWYQQKPDGTVKLLIYHTSRLHSGVPSRFSGSGSGTDYSLTISNLEQEDIATYFCQQGNTLPYTFGGGTKLEITGGGGSGGGGSGGGGSEVKLQESGPGLVAPSQSLSVTCTVSGVSLPDYGVSWIRQPPRKGLEWLGVIWGSETTYYNSALKSRLTIIKDNSKSQVFLKMNSLQTDDTAIYYCAKHYYYGGSYAMDYWGQGTSVTVSSTTTPAPRPPTPAPTIASQPLSLRPEACFMYVAAAAFVLLFFVGCGVLLSKKGRRSYKMKLLSSIEQACDICRLKKLKCSKEKPKCAKCLKNNWECRYSPKTKRSPLTRAHLTEVESRLERLEQLFLLIFPREDLDMILKMDSLQDIKALLTGLFVQDNVNKDAVTDRLASVETDMPLTLRQHRISATSSSEESSNKGQRQLTVSAAAGGSGGSGGSDALDDFDLDMLGSDALDDFDLDMLGSDALDDFDLDMLGSDALDDFDLDMLGS

SEQ ID NO: 93 - protein, 547 aa, Artificial sequence
  Synthetic construct
MALPVTALLLPLALLLHAARPEQKLISEEDLDIQMTQTTSSLSASLGDRVTISCRASQDISKYLNWYQQKPDGTVKLLIYHTSRLHSGVPSRFSGSGSGTDYSLTISNLEQEDIATYFCQQGNTLPYTFGGGTKLEITGGGGSGGGGSGGGGSEVKLQESGPGLVAPSQSLSVTCTVSGVSLPDYGVSWIRQPPRKGLEWLGVIWGSETTYYNSALKSRLTIIKDNSKSQVFLKMNSLQTDDTAIYYCAKHYYYGGSYAMDYWGQGTSVTVSSTTTPAPRPPTPAPTIASQPLSLRPEACFMYVAAAAFVLLFFVGCGVLLSKTKKQRKKLHDRLRMKLLSSIEQACDICRLKKLKCSKEKPKCAKCLKNNWECRYSPKTKRSPLTRAHLTEVESRLERLEQLFLLIFPREDLDMILKMDSLQDIKALLTGLFVQDNVNKDAVTDRLASVETDMPLTLRQHRISATSSSEESSNKGQRQLTVSAAAGGSGGSGGSDALDDFDLDMLGSDALDDFDLDMLGSDALDDFDLDMLGSDALDDFDLDMLGS

SEQ ID NO: 94 - protein, 544 aa, Artificial sequence
  Synthetic construct
MALPVTALLLPLALLLHAARPEQKLISEEDLDIQMTQTTSSLSASLGDRVTISCRASQDISKYLNWYQQKPDGTVKLLIYHTSRLHSGVPSRFSGSGSGTDYSLTISNLEQEDIATYFCQQGNTLPYTFGGGTKLEITGGGGSGGGGSGGGGSEVKLQESGPGLVAPSQSLSVTCTVSGVSLPDYGVSWIRQPPRKGLEWLGVIWGSETTYYNSALKSRLTIIKDNSKSQVFLKMNSLQTDDTAIYYCAKHYYYGGSYAMDYWGQGTSVTVSSTTTPAPRPPTPAPTIASQPLSLRPEACFMYVAAAAFVLLFFVGCGVLLSKRKRRTKTIRRMKLLSSIEQACDICRLKKLKCSKEKPKCAKCLKNNWECRYSPKTKRSPLTRAHLTEVESRLERLEQLFLLIFPREDLDMILKMDSLQDIKALLTGLFVQDNVNKDAVTDRLASVETDMPLTLRQHRISATSSSEESSNKGQRQLTVSAAAGGSGGSGGSDALDDFDLDMLGSDALDDFDLDMLGSDALDDFDLDMLGSDALDDFDLDMLGS

SEQ ID NO: 95 - protein, 547 aa, Artificial sequence
  Synthetic construct
MALPVTALLLPLALLLHAARPEQKLISEEDLDIQMTQTTSSLSASLGDRVTISCRASQDISKYLNWYQQKPDGTVKLLIYHTSRLHSGVPSRFSGSGSGTDYSLTISNLEQEDIATYFCQQGNTLPYTFGGGTKLEITGGGGSGGGGSGGGGSEVKLQESGPGLVAPSQSLSVTCTVSGVSLPDYGVSWIRQPPRKGLEWLGVIWGSETTYYNSALKSRLTIIKDNSKSQVFLKMNSLQTDDTAIYYCAKHYYYGGSYAMDYWGQGTSVTVSSTTTPAPRPPTPAPTIASQPLSLRPEACFMYVAAAAFVLLFFVGCGVLLSRKRRKERERSRLPRMKLLSSIEQACDICRLKKLKCSKEKPKCAKCLKNNWECRYSPKTKRSPLTRAHLTEVESRLERLEQLFLLIFPREDLDMILKMDSLQDIKALLTGLFVQDNVNKDAVTDRLASVETDMPLTLRQHRISATSSSEESSNKGQRQLTVSAAAGGSGGSGGSDALDDFDLDMLGSDALDDFDLDMLGSDALDDFDLDMLGSDALDDFDLDMLGS

SEQ ID NO: 96 - protein, 543 aa, Artificial sequence
  Synthetic construct
MALPVTALLLPLALLLHAARPEQKLISEEDLDIQMTQTTSSLSASLGDRVTISCRASQDISKYLNWYQQKPDGTVKLLIYHTSRLHSGVPSRFSGSGSGTDYSLTISNLEQEDIATYFCQQGNTLPYTFGGGTKLEITGGGGSGGGGSGGGGSEVKLQESGPGLVAPSQSLSVTCTVSGVSLPDYGVSWIRQPPRKGLEWLGVIWGSETTYYNSALKSRLTIIKDNSKSQVFLKMNSLQTDDTAIYYCAKHYYYGGSYAMDYWGQGTSVTVSSTTTPAPRPPTPAPTIASQPLSLRPEACFMYVAAAAFVLLFFVGCGVLLSRKKRMAKYEKMKLLSSIEQACDICRLKKLKCSKEKPKCAKCLKNNWECRYSPKTKRSPLTRAHLTEVESRLERLEQLFLLIFPREDLDMILKMDSLQDIKALLTGLFVQDNVNKDAVTDRLASVETDMPLTLRQHRISATSSSEESSNKGQRQLTVSAAAGGSGGSGGSDALDDFDLDMLGSDALDDFDLDMLGSDALDDFDLDMLGSDALDDFDLDMLGS

SEQ ID NO: 97 - protein, 547 aa, Artificial sequence
  Synthetic construct
MALPVTALLLPLALLLHAARPEQKLISEEDLDIQMTQTTSSLSASLGDRVTISCRASQDISKYLNWYQQKPDGTVKLLIYHTSRLHSGVPSRFSGSGSGTDYSLTISNLEQEDIATYFCQQGNTLPYTFGGGTKLEITGGGGSGGGGSGGGGSEVKLQESGPGLVAPSQSLSVTCTVSGVSLPDYGVSWIRQPPRKGLEWLGVIWGSETTYYNSALKSRLTIIKDNSKSQVFLKMNSLQTDDTAIYYCAKHYYYGGSYAMDYWGQGTSVTVSSTTTPAPRPPTPAPTIASQPLSLRPEACFMYVAAAAFVLLFFVGCGVLLSKTKKQRKQMHNHLRMKLLSSIEQACDICRLKKLKCSKEKPKCAKCLKNNWECRYSPKTKRSPLTRAHLTEVESRLERLEQLFLLIFPREDLDMILKMDSLQDIKALLTGLFVQDNVNKDAVTDRLASVETDMPLTLRQHRISATSSSEESSNKGQRQLTVSAAAGGSGGSGGSDALDDFDLDMLGSDALDDFDLDMLGSDALDDFDLDMLGSDALDDFDLDMLGS

SEQ ID NO: 98 - protein, 543 aa, Artificial sequence
  Synthetic construct
MALPVTALLLPLALLLHAARPEQKLISEEDLDIQMTQTTSSLSASLGDRVTISCRASQDISKYLNWYQQKPDGTVKLLIYHTSRLHSGVPSRFSGSGSGTDYSLTISNLEQEDIATYFCQQGNTLPYTFGGGTKLEITGGGGSGGGGSGGGGSEVKLQESGPGLVAPSQSLSVTCTVSGVSLPDYGVSWIRQPPRKGLEWLGVIWGSETTYYNSALKSRLTIIKDNSKSQVFLKMNSLQTDDTAIYYCAKHYYYGGSYAMDYWGQGTSVTVSSTTTPAPRPPTPAPTIASQPLSLRPEACFMYVAAAAFVLLFFVGCGVLLSKKSKLAKKRKMKLLSSIEQACDICRLKKLKCSKEKPKCAKCLKNNWECRYSPKTKRSPLTRAHLTEVESRLERLEQLFLLIFPREDLDMILKMDSLQDIKALLTGLFVQDNVNKDAVTDRLASVETDMPLTLRQHRISATSSSEESSNKGQRQLTVSAAAGGSGGSGGSDALDDFDLDMLGSDALDDFDLDMLGSDALDDFDLDMLGSDALDDFDLDMLGS

SEQ ID NO: 99 - protein, 543 aa, Artificial sequence
  Synthetic construct
MALPVTALLLPLALLLHAARPEQKLISEEDLDIQMTQTTSSLSASLGDRVTISCRASQDISKYLNWYQQKPDGTVKLLIYHTSRLHSGVPSRFSGSGSGTDYSLTISNLEQEDIATYFCQQGNTLPYTFGGGTKLEITGGGGSGGGGSGGGGSEVKLQESGPGLVAPSQSLSVTCTVSGVSLPDYGVSWIRQPPRKGLEWLGVIWGSETTYYNSALKSRLTIIKDNSKSQVFLKMNSLQTDDTAIYYCAKHYYYGGSYAMDYWGQGTSVTVSSTTTPAPRPPTPAPTIASQPLSLRPEACFMYVAAAAFVLLFFVGCGVLLSKKRKLAKKRKMKLLSSIEQACDICRLKKLKCSKEKPKCAKCLKNNWECRYSPKTKRSPLTRAHLTEVESRLERLEQLFLLIFPREDLDMILKMDSLQDIKALLTGLFVQDNVNKDAVTDRLASVETDMPLTLRQHRISATSSSEESSNKGQRQLTVSAAAGGSGGSGGSDALDDFDLDMLGSDALDDFDLDMLGSDALDDFDLDMLGSDALDDFDLDMLGS

SEQ ID NO: 100 - protein, 4 aa, Artificial sequence
  Synthetic construct
RRKK

SEQ ID NO: 101 - protein, 3 aa, Artificial sequence
  Synthetic construct
RKR

SEQ ID NO: 102 - protein, 3 aa, Artificial sequence
  Synthetic construct
KKK

SEQ ID NO: 103 - protein, 1 aa, Artificial sequence
  Synthetic construct
H

SEQ ID NO: 104 - protein, 7 aa, Artificial sequence
  Synthetic construct
KYKQKPK

SEQ ID NO: 105 - protein, 4 aa, Artificial sequence
  Synthetic construct
KRRR

SEQ ID NO: 106 - protein, 2 aa, Artificial sequence
  Synthetic construct
RK

SEQ ID NO: 107 - protein, 7 aa, Artificial sequence
  Synthetic construct
RKKRKGK

SEQ ID NO: 108 - protein, 2 aa, Artificial sequence
  Synthetic construct
RR

SEQ ID NO: 109 - protein, 4 aa, Artificial sequence
  Synthetic construct
RISR

SEQ ID NO: 110 - protein, 7 aa, Artificial sequence
  Synthetic construct
KCGKGAK

SEQ ID NO: 111 - protein, 3 aa, Artificial sequence
  Synthetic construct
RRR

SEQ ID NO: 112 - protein, 6 aa, Artificial sequence
  Synthetic construct
KQQRIK

SEQ ID NO: 113 - protein, 3 aa, Artificial sequence
  Synthetic construct
RRK

SEQ ID NO: 114 - protein, 1 aa, Artificial sequence
  Synthetic construct
K

SEQ ID NO: 115 - protein, 4 aa, Artificial sequence
  Synthetic construct
HRKR

SEQ ID NO: 116 - protein, 4 aa, Artificial sequence
  Synthetic construct
KIFK

SEQ ID NO: 117 - protein, 1 aa, Artificial sequence
  Synthetic construct
R

SEQ ID NO: 118 - protein, 7 aa, Artificial sequence
  Synthetic construct
RSKKLEH

SEQ ID NO: 119 - protein, 7 aa, Artificial sequence
  Synthetic construct
KSKRREH

SEQ ID NO: 120 - protein, 7 aa, Artificial sequence
  Synthetic construct
KRNRGGK

SEQ ID NO: 121 - protein, 3 aa, Artificial sequence
  Synthetic construct
KRR

SEQ ID NO: 122 - protein, 4 aa, Artificial sequence
  Synthetic construct
HYRR

SEQ ID NO: 123 - protein, 6 aa, Artificial sequence
  Synthetic construct
KRKRTH

SEQ ID NO: 124 - protein, 2 aa, Artificial sequence
  Synthetic construct
KK

SEQ ID NO: 125 - protein, 5 aa, Artificial sequence
  Synthetic construct
RKVSK

SEQ ID NO: 126 - protein, 5 aa, Artificial sequence
  Synthetic construct
RKKYR

SEQ ID NO: 127 - protein, 2 aa, Artificial sequence
  Synthetic construct
KR

SEQ ID NO: 128 - protein, 2 aa, Artificial sequence
  Synthetic construct
HH

SEQ ID NO: 129 - protein, 6 aa, Artificial sequence
  Synthetic construct
RWKKSR

SEQ ID NO: 130 - protein, 5 aa, Artificial sequence
  Synthetic construct
RRQRR

SEQ ID NO: 131 - protein, 6 aa, Artificial sequence
  Synthetic construct
RHRKKR

SEQ ID NO: 132 - protein, 3 aa, Artificial sequence
  Synthetic construct
KRK

SEQ ID NO: 133 - protein, 5 aa, Artificial sequence
  Synthetic construct
KFKRR

SEQ ID NO: 134 - protein, 4 aa, Artificial sequence
  Synthetic construct
KHRR

SEQ ID NO: 135 - protein, 5 aa, Artificial sequence
  Synthetic construct
RMKKK

SEQ ID NO: 136 - protein, 5 aa, Artificial sequence
  Synthetic construct
RMRKK

SEQ ID NO: 137 - protein, 7 aa, Artificial sequence
  Synthetic construct
RRRQKRR

SEQ ID NO: 138 - protein, 5 aa, Artificial sequence
  Synthetic construct
RHKRK

SEQ ID NO: 139 - protein, 4 aa, Artificial sequence
  Synthetic construct
RARR

SEQ ID NO: 140 - protein, 5 aa, Artificial sequence
  Synthetic construct
RRLRK

SEQ ID NO: 141 - protein, 4 aa, Artificial sequence
  Synthetic construct
RRGR

SEQ ID NO: 142 - protein, 5 aa, Artificial sequence
  Synthetic construct
RKMKR

SEQ ID NO: 143 - protein, 13 aa, Artificial sequence
  Synthetic construct
RRRLRKQARAHGK

SEQ ID NO: 144 - protein, 9 aa, Artificial sequence
  Synthetic construct
KRSKSRKTK

SEQ ID NO: 145 - protein, 8 aa, Artificial sequence
  Synthetic construct
RRRRHTFK

SEQ ID NO: 146 - protein, 8 aa, Artificial sequence
  Synthetic construct
KKGRRSYK

SEQ ID NO: 147 - protein, 15 aa, Artificial sequence
  Synthetic construct
RFKKTWKLRALKEGK

SEQ ID NO: 148 - protein, 9 aa, Artificial sequence
  Synthetic construct
KLRKRHRKH

SEQ ID NO: 149 - protein, 9 aa, Artificial sequence
  Synthetic construct
RRRCGQKKK

SEQ ID NO: 150 - protein, 11 aa, Artificial sequence
  Synthetic construct
RIRAAHRRTMR

SEQ ID NO: 151 - protein, 9 aa, Artificial sequence
  Synthetic construct
RNWKRKNTK

SEQ ID NO: 152 - protein, 9 aa, Artificial sequence
  Synthetic construct
KVYKWKQSR

SEQ ID NO: 153 - protein, 14 aa, Artificial sequence
  Synthetic construct
KTKKQRKKLHDRLR

SEQ ID NO: 154 - protein, 11 aa, Artificial sequence
  Synthetic construct
KRKRRTKTIRR

SEQ ID NO: 155 - protein, 14 aa, Artificial sequence
  Synthetic construct
RKRRKERERSRLPR

SEQ ID NO: 156 - protein, 9 aa, Artificial sequence
  Synthetic construct
KYRRRHRKH

SEQ ID NO: 157 - protein, 8 aa, Artificial sequence
  Synthetic construct
RLRLQKHR

SEQ ID NO: 158 - protein, 8 aa, Artificial sequence
  Synthetic construct
RVRIAHQH

SEQ ID NO: 159 - protein, 10 aa, Artificial sequence
  Synthetic construct
RKKRMAKYEK

SEQ ID NO: 160 - protein, 13 aa, Artificial sequence
  Synthetic construct
RRKSIKKKRALRR

SEQ ID NO: 161 - protein, 8 aa, Artificial sequence
  Synthetic construct
RSRKVDKR

SEQ ID NO: 162 - protein, 10 aa, Artificial sequence
  Synthetic construct
KRRDKERQAK

SEQ ID NO: 163 - protein, 14 aa, Artificial sequence
  Synthetic construct
KTKKQRKQMHNHLR

SEQ ID NO: 164 - protein, 10 aa, Artificial sequence
  Synthetic construct
KKSKLAKKRK

SEQ ID NO: 165 - protein, 12 aa, Artificial sequence
  Synthetic construct
HPLRKRRKRKKK

SEQ ID NO: 166 - protein, 10 aa, Artificial sequence
  Synthetic construct
RRRSKYSKAK

SEQ ID NO: 167 - protein, 10 aa, Artificial sequence
  Synthetic construct
HRRCKHRTGK

SEQ ID NO: 168 - protein, 8 aa, Artificial sequence
  Synthetic construct
KSKRREKK

SEQ ID NO: 169 - protein, 10 aa, Artificial sequence
  Synthetic construct
KCVRRKKEQK

SEQ ID NO: 170 - protein, 9 aa, Artificial sequence
  Synthetic construct
KCWRSHKQR

SEQ ID NO: 171 - protein, 10 aa, Artificial sequence
  Synthetic construct
KKRKLAKKRK

SEQ ID NO: 172 - protein, 6 aa, Artificial sequence
  Synthetic construct
KRKRKH

SEQ ID NO: 173 - protein, 6 aa, Artificial sequence
  Synthetic construct
RRKREH

SEQ ID NO: 174 - protein, 7 aa, Artificial sequence
  Synthetic construct
RRRRREH

SEQ ID NO: 175 - protein, 273 aa, Artificial sequence
  Synthetic construct
MALPVTALLLPLALLLHAARPEQKLISEEDLDIQMTQTTSSLSASLGDRVTISCRASQDISKYLNWYQQKPDGTVKLLIYHTSRLHSGVPSRFSGSGSGTDYSLTISNLEQEDIATYFCQQGNTLPYTFGGGTKLEITGGGGSGGGGSGGGGSEVKLQESGPGLVAPSQSLSVTCTVSGVSLPDYGVSWIRQPPRKGLEWLGVIWGSETTYYNSALKSRLTIIKDNSKSQVFLKMNSLQTDDTAIYYCAKHYYYGGSYAMDYWGQGTSVTVSS

SEQ ID NO: 176 - protein, 21 aa, Artificial sequence
  Synthetic construct
MALPVTALLLPLALLLHAARP

SEQ ID NO: 177 - protein, 10 aa, Artificial sequence
  Synthetic construct
EQKLISEEDL

SEQ ID NO: 178 - protein, 309 aa, Artificial sequence
  Synthetic construct
ILDYSFGGGAGRDIPPPLIEEACELPECQEDAGNKVCSLQCNNHACGWDGGDCSLNFNDPWKNCTQSLQCWKYFSDGHCDSQCNSAGCLFDGFDCQRAEGQCNPLYDQYCKDHFSDGHCDQGCNSAECEWDGLDCAEHVPERLAAGTLVVVVLMPPEQLRNSSFHFLRELSRVLHTNVVFKRDAHGQQMIFPYYGREEELRKHPIKRAAEGWAAPDALLGQVKASLLPGGSEGGRRRRELDPMDVRGSIVYLEIDNRQCVQASSQCFQSATDVAAFLGALASLGSLNIPYKIEAVQSETVEPPPPAQLH

SEQ ID NO: 179 - protein, 32 aa, Artificial sequence
  Synthetic construct
ILDYSFGGGAGRDIPPPLIEETVEPPPPAQLH

SEQ ID NO: 180 - protein, 27 aa, Artificial sequence
  Synthetic construct
TTTPAPRPPTPAPTIASQPLSLRPEAC

SEQ ID NO: 181 - protein, 22 aa, Artificial sequence
  Synthetic construct
FMYVAAAAFVLLFFVGCGVLLS

SEQ ID NO: 182 - protein, 211 aa, Artificial sequence
  Synthetic construct
MKLLSSIEQACDICRLKKLKCSKEKPKCAKCLKNNWECRYSPKTKRSPLTRAHLTEVESRLERLEQLFLLIFPREDLDMILKMDSLQDIKALLTGLFVQDNVNKDAVTDRLASVETDMPLTLRQHRISATSSSEESSNKGQRQLTVSAAAGGSGGSGGSDALDDFDLDMLGSDALDDFDLDMLGSDALDDFDLDMLGSDALDDFDLDMLGS

SEQ ID NO: 183 - protein, 20 aa, Artificial sequence
  Synthetic construct
LYTAPPSTPPATSLTPERTQ

SEQ ID NO: 184 - protein, 24 aa, Artificial sequence
  Synthetic construct
APAAAPEVSEEPRPLEPPEPSVPL

SEQ ID NO: 185 - protein, 16 aa, Artificial sequence
  Synthetic construct
VHPHAGTAPPANQLPW

SEQ ID NO: 186 - protein, 33 aa, Artificial sequence
  Synthetic construct
DYKDHDGDYKDHDIDYKDDDDKPVEPPLPSQLH

SEQ ID NO: 187 - protein, 20 aa, Artificial sequence
  Synthetic construct
GGSGGSGGSGGSGGSGGSLH

SEQ ID NO: 188 - protein, 27 aa, Artificial sequence
  Synthetic construct
GGSGGSGGSPLGVRGKGGSGGSGGSLH

SEQ ID NO: 189 - protein, 32 aa, Artificial sequence
  Synthetic construct
GGSGGSGGSSPLAQAVRSSSRGGSGGSGGSLH

SEQ ID NO: 190 - protein, 45 aa, Artificial sequence
  Synthetic construct
TTTPAPRPPTPAPTIASQPLSLRPEACRPAAGGAVHTRGLDFACD

SEQ ID NO: 191 - protein, 27 aa, Artificial sequence
  Synthetic construct
TTTPAPRPPTPAPTIASQPLSLRPEAC

SEQ ID NO: 192 - protein, 39 aa, Artificial sequence
  Synthetic construct
IEVMYPPPYLDNEKSNGTIIHVKGKHLCPSPLFPGPSKP

SEQ ID NO: 193 - protein, 27 aa, Artificial sequence
  Synthetic construct
GGGGSGGGGSGGGGSESKYGPPCPPCP

SEQ ID NO: 194 - protein, 186 aa, Artificial sequence [sequence omitted]

SEQ ID NO: 195 - protein, 129 aa, Artificial sequence
  Synthetic construct
KTLEEAPSAPPQGVTVSKNDGNGTAILVSWQPPPEDTQNGMVQEYKVWCLGNETRYHINKTVDGSTFSVVIPFLVPGIRYSVEVAASTGAGSGVKSEPQFIQLDAHGNPVSPEDQVSLAQQISDVVKQP

SEQ ID NO: 196 - protein, 109 aa, Artificial sequence
  Synthetic construct
KTLEEAPSAPPQGVTVSKNDGNGTAILVSWQPPPEDTQNGMVQEYKVWCLGNETRYHINKTVDGSTFSVVIPFLVPGIRYSVEVAASTGAGSGVKSEPQFIQLDVVKQP

SEQ ID NO: 197 - protein, 113 aa, Artificial sequence
  Synthetic construct
KTLEEAPSAPPQGVTVSKNDGNGTAILVSWQPPPEDTQNGMVQEYKVWCLGNETRYHINKTVDGSTFSVVIPFLVPGIRYSVEVAASTGAGSGVKSEPQFIQLDGGSGGSGGS

SEQ ID NO: 198 - protein, 113 aa, Artificial sequence
  Synthetic construct
KTLEEAPSAPPQGVTVSKNDGNGTAILVSWQPPPEDTQNGMVQEYKVWCLGNETRYHINKTVDGSTFSVVIPFLVPGIRYSVEVAASTGAGSGVKSEPQFIQLDEPPPPAQLH

SEQ ID NO: 199 - protein, 533 aa, Artificial sequence
  Synthetic construct
MALPVTALLLPLALLLHAARPEQKLISEEDLDIQMTQTTSSLSASLGDRVTISCRASQDISKYLNWYQQKPDGTVKLLIYHTSRLHSGVPSRFSGSGSGTDYSLTISNLEQEDIATYFCQQGNTLPYTFGGGTKLEITGGGGSGGGGSGGGGSEVKLQESGPGLVAPSQSLSVTCTVSGVSLPDYGVSWIRQPPRKGLEWLGVIWGSETTYYNSALKSRLTIIKDNSKSQVFLKMNSLQTDDTAIYYCAKHYYYGGSYAMDYWGQGTSVTVSSLYTAPPSTPPATSLTPERTQLLYLLAVAVVIILFIILLGVIMAKRKRKHMKLLSSIEQACDICRLKKLKCSKEKPKCAKCLKNNWECRYSPKTKRSPLTRAHLTEVESRLERLEQLFLLIFPREDLDMILKMDSLQDIKALLTGLFVQDNVNKDAVTDRLASVETDMPLTLRQHRISATSSSEESSNKGQRQLTVSAAAGGSGGSGGSDALDDFDLDMLGSDALDDFDLDMLGSDALDDFDLDMLGSDALDDFDLDMLGS

SEQ ID NO: 200 - protein, 531 aa, Artificial sequence
  Synthetic construct
MALPVTALLLPLALLLHAARPEQKLISEEDLDIQMTQTTSSLSASLGDRVTISCRASQDISKYLNWYQQKPDGTVKLLIYHTSRLHSGVPSRFSGSGSGTDYSLTISNLEQEDIATYFCQQGNTLPYTFGGGTKLEITGGGGSGGGGSGGGGSEVKLQESGPGLVAPSQSLSVTCTVSGVSLPDYGVSWIRQPPRKGLEWLGVIWGSETTYYNSALKSRLTIIKDNSKSQVFLKMNSLQTDDTAIYYCAKHYYYGGSYAMDYWGQGTSVTVSSLYTAPPSTPPATSLTPERTQFMYVAAAAFVLLFFVGCGVLLSRKRRRMKLLSSIEQACDICRLKKLKCSKEKPKCAKCLKNNWECRYSPKTKRSPLTRAHLTEVESRLERLEQLFLLIFPREDLDMILKMDSLQDIKALLTGLFVQDNVNKDAVTDRLASVETDMPLTLRQHRISATSSSEESSNKGQRQLTVSAAAGGSGGSGGSDALDDFDLDMLGSDALDDFDLDMLGSDALDDFDLDMLGSDALDDFDLDMLGS

SEQ ID NO: 201 - protein, 512 aa, Artificial sequence
  Synthetic construct
MALPVTALLLPLALLLHAARPEQKLISEEDLDIQMTQTTSSLSASLGDRVTISCRASQDISKYLNWYQQKPDGTVKLLIYHTSRLHSGVPSRFSGSGSGTDYSLTISNLEQEDIATYFCQQGNTLPYTFGGGTKLEITGGGGSGGGGSGGGGSEVKLQESGPGLVAPSQSLSVTCTVSGVSLPDYGVSWIRQPPRKGLEWLGVIWGSETTYYNSALKSRLTIIKDNSKSQVFLKMNSLQTDDTAIYYCAKHYYYGGSYAMDYWGQGTSVTVSSFMYVAAAAFVLLFFVGCGVLLSKRKRKHMKLLSSIEQACDICRLKKLKCSKEKPKCAKCLKNNWECRYSPKTKRSPLTRAHLTEVESRLERLEQLFLLIFPREDLDMILKMDSLQDIKALLTGLFVQDNVNKDAVTDRLASVETDMPLTLRQHRISATSSSEESSNKGQRQLTVSAAAGGSGGSGGSDALDDFDLDMLGSDALDDFDLDMLGSDALDDFDLDMLGSDALDDFDLDMLGS

SEQ ID NO: 202 - protein, 820 aa, Artificial sequence
  Synthetic construct
MALPVTALLLPLALLLHAARPEQKLISEEDLDIQMTQTTSSLSASLGDRVTISCRASQDISKYLNWYQQKPDGTVKLLIYHTSRLHSGVPSRFSGSGSGTDYSLTISNLEQEDIATYFCQQGNTLPYTFGGGTKLEITGGGGSGGGGSGGGGSEVKLQESGPGLVAPSQSLSVTCTVSGVSLPDYGVSWIRQPPRKGLEWLGVIWGSETTYYNSALKSRLTIIKDNSKSQVFLKMNSLQTDDTAIYYCAKHYYYGGSYAMDYWGQGTSVTVSSILDYSFGGGAGRDIPPPLIEEACELPECQEDAGNKVCSLQCNNHACGWDGGDCSLNFNDPWKNCTQSLQCWKYFSDGHCDSQCNSAGCLFDGFDCQRAEGQCNPLYDQYCKDHFSDGHCDQGCNSAECEWDGLDCAEHVPERLAAGTLVVVVLMPPEQLRNSSFHFLRELSRVLHTNVVFKRDAHGQQMIFPYYGREEELRKHPIKRAAEGWAAPDALLGQVKASLLPGGSEGGRRRRELDPMDVRGSIVYLEIDNRQCVQASSQCFQSATDVAAFLGALASLGSLNIPYKIEAVQSETVEPPPPAQLHFMYVAAAAFVLLFFVGCGVLLSRKRRRMKLLSSIEQACDICRLKKLKCSKEKPKCAKCLKNNWECRYSPKTKRSPLTRAHLTEVESRLERLEQLFLLIFPREDLDMILKMDSLQDIKALLTGLFVQDNVNKDAVTDRLASVETDMPLTLRQHRISATSSSEESSNKGQRQLTVSAAAGGSGGSGGSDALDDFDLDMLGSDALDDFDLDMLGSDALDDFDLDMLGSDALDDFDLDMLGS

SEQ ID NO: 203 - protein, 821 aa, Artificial sequence; identical to SEQ ID NO: 73
  Synthetic construct

SEQ ID NO: 204 - protein, 538 aa, Artificial sequence
  Synthetic construct
MALPVTALLLPLALLLHAARPEQKLISEEDLDIQMTQTTSSLSASLGDRVTISCRASQDISKYLNWYQQKPDGTVKLLIYHTSRLHSGVPSRFSGSGSGTDYSLTISNLEQEDIATYFCQQGNTLPYTFGGGTKLEITGGGGSGGGGSGGGGSEVKLQESGPGLVAPSQSLSVTCTVSGVSLPDYGVSWIRQPPRKGLEWLGVIWGSETTYYNSALKSRLTIIKDNSKSQVFLKMNSLQTDDTAIYYCAKHYYYGGSYAMDYWGQGTSVTVSSTTTPAPRPPTPAPTIASQPLSLRPEACFMYVAAAAFVLLFFVGCGVLLSRKRRRMKLLSSIEQACDICRLKKLKCSKEKPKCAKCLKNNWECRYSPKTKRSPLTRAHLTEVESRLERLEQLFLLIFPREDLDMILKMDSLQDIKALLTGLFVQDNVNKDAVTDRLASVETDMPLTLRQHRISATSSSEESSNKGQRQLTVSAAAGGSGGSGGSDALDDFDLDMLGSDALDDFDLDMLGSDALDDFDLDMLGSDALDDFDLDMLGS

SEQ ID NO: 205 - protein, 539 aa, Artificial sequence
  Synthetic construct
MALPVTALLLPLALLLHAARPEQKLISEEDLDIQMTQTTSSLSASLGDRVTISCRASQDISKYLNWYQQKPDGTVKLLIYHTSRLHSGVPSRFSGSGSGTDYSLTISNLEQEDIATYFCQQGNTLPYTFGGGTKLEITGGGGSGGGGSGGGGSEVKLQESGPGLVAPSQSLSVTCTVSGVSLPDYGVSWIRQPPRKGLEWLGVIWGSETTYYNSALKSRLTIIKDNSKSQVFLKMNSLQTDDTAIYYCAKHYYYGGSYAMDYWGQGTSVTVSSTTTPAPRPPTPAPTIASQPLSLRPEACFMYVAAAAFVLLFFVGCGVLLSKRKRKHMKLLSSIEQACDICRLKKLKCSKEKPKCAKCLKNNWECRYSPKTKRSPLTRAHLTEVESRLERLEQLFLLIFPREDLDMILKMDSLQDIKALLTGLFVQDNVNKDAVTDRLASVETDMPLTLRQHRISATSSSEESSNKGQRQLTVSAAAGGSGGSGGSDALDDFDLDMLGSDALDDFDLDMLGSDALDDFDLDMLGSDALDDFDLDMLGS

SEQ ID NO: 206 - protein, 23 aa, Artificial sequence
  Synthetic construct
LLYLLAVAVVIILFIILLGVIMA

SEQ ID NO: 207 - protein, 5 aa, Artificial sequence
  Synthetic construct
RKRRR

SEQ ID NO: 208 - protein, 543 aa, Artificial sequence
  Synthetic construct
MALPVTALLLPLALLLHAARPEQKLISEEDLDIQMTQTTSSLSASLGDRVTISCRASQDISKYLNWYQQKPDGTVKLLIYHTSRLHSGVPSRFSGSGSGTDYSLTISNLEQEDIATYFCQQGNTLPYTFGGGTKLEITGGGGSGGGGSGGGGSEVKLQESGPGLVAPSQSLSVTCTVSGVSLPDYGVSWIRQPPRKGLEWLGVIWGSETTYYNSALKSRLTIIKDNSKSQVFLKMNSLQTDDTAIYYCAKHYYYGGSYAMDYWGQGTSVTVSSILDYSFGGGAGRDIPPPLIEETVEPPPPAQLHFMYVAAAAFVLLFFVGCGVLLSRKRRRMKLLSSIEQACDICRLKKLKCSKEKPKCAKCLKNNWECRYSPKTKRSPLTRAHLTEVESRLERLEQLFLLIFPREDLDMILKMDSLQDIKALLTGLFVQDNVNKDAVTDRLASVETDMPLTLRQHRISATSSSEESSNKGQRQLTVSAAAGGSGGSGGSDALDDFDLDMLGSDALDDFDLDMLGSDALDDFDLDMLGSDALDDFDLDMLGS

SEQ ID NO: 209 - protein, 544 aa, Artificial sequence
  Synthetic construct
MALPVTALLLPLALLLHAARPEQKLISEEDLDIQMTQTTSSLSASLGDRVTISCRASQDISKYLNWYQQKPDGTVKLLIYHTSRLHSGVPSRFSGSGSGTDYSLTISNLEQEDIATYFCQQGNTLPYTFGGGTKLEITGGGGSGGGGSGGGGSEVKLQESGPGLVAPSQSLSVTCTVSGVSLPDYGVSWIRQPPRKGLEWLGVIWGSETTYYNSALKSRLTIIKDNSKSQVFLKMNSLQTDDTAIYYCAKHYYYGGSYAMDYWGQGTSVTVSSILDYSFGGGAGRDIPPPLIEETVEPPPPAQLHFMYVAAAAFVLLFFVGCGVLLSKRKRKHMKLLSSIEQACDICRLKKLKCSKEKPKCAKCLKNNWECRYSPKTKRSPLTRAHLTEVESRLERLEQLFLLIFPREDLDMILKMDSLQDIKALLTGLFVQDNVNKDAVTDRLASVETDMPLTLRQHRISATSSSEESSNKGQRQLTVSAAAGGSGGSGGSDALDDFDLDMLGSDALDDFDLDMLGSDALDDFDLDMLGSDALDDFDLDMLGS

SEQ ID NO: 210 - DNA, 8960 bp, Artificial sequence
  Synthetic construct
cgataccgtcgaccaaggcagctgtagatcttagccactttttaaaagaaaaggggggactggaagggctaattcactcccaacgaagacaagatctgctttttgcttgtactgggtctctctggttagaccagatctgagcctgggagctctctggctaactagggaacccactgcttaagcctcaataaagcttgccttgagtgcttcaagtagtgtgtgcccgtctgttgtgtgactctggtaactagagatccctcagacccttttagtcagtgtggaaaatctctagcagcatctagaattaattccgtgtattctatagtgtcacctaaatcgtatgtgtatgatacataaggttatgtattaattgtagccgcgttctaacgacaatatgtacaagcctaattgtgtagcatctggcttactgaagcagaccctatcatctctctcgtaaactgccgtcagagtcggtttggttggacgaaccttctgagtttctggtaacgccgtcccgcacccggaaatggtcagcgaaccaatcagcagggtcatcgctagccagatcctctacgccggacgcatcgtggccggcatcaccggcgccacaggtgcggttgctggcgcctatatcgccgacatcaccgatggggaagatcgggctcgccacttcgggctcatgagcgcttgtttcggcgtgggtatggtggcaggccccgtggccgggggactgttgggcgccatctccttgcatgcaccattccttgcggcggcggtgctcaacggcctcaacctactactgggctgcttcctaatgcaggagtcgcataagggagagcgtcgaatggtgcactctcagtacaatctagctctgatgccgcatagttaagccagccccgacacccgccaacacccgctgacgcgccctgacgggcttgtctgctcccggcatccgcttacagacaagctgtgaccgtctccgggagctgcatgtgtcagaggttttcaccgtcatcaccgaaacgcgcgagacgaaagggcctcgtgatacgcctatttttataggttaatgtcatgataataatggtttcttagacgtcaggtggcacttttcggggaaatgtgcgcggaacccctatttgtttatttttctaaatacattcaaatatgtatccgctcatgagacaataaccctgataaatgcttcaataatattgaaaaaggaagagtatgagtattcaacatttccgtgtcgcccttattcccttttttgcggcattttgccttcctgtttttgctcacccagaaacgctggtgaaagtaaaagatgctgaagatcagttgggtgcacgagtgggttacatcgaactggatctcaacagcggtaagatccttgagagttttcgccccgaagaacgttttccaatgatgagcacttttaaagttctgctatgtggcgcggtattatcccgtattgacgccgggcaagagcaactcggtcgccgcatacactattctcagaatgacttggttgagtactcaccagtcacagaaaagcatcttacggatggcatgacagtaagagaattatgcagtgctgccataaccatgagtgataacactgcggccaacttacttctgacaacgatcggaggaccgaaggagctaaccgcttttttgcacaacatgggggatcatgtaactcgccttgatcgttgggaaccggagctgaatgaagccataccaaacgacgagcgtgacaccacgatgcctgtagcaatggcaacaacgttgcgcaaactattaactggcgaactacttactctagcttcccggcaacaattaatagactggatggaggcggataaagttgcaggaccacttctgcgctcggcccttccggctggctggtttattgctgataaatctggagccggtgagcgtgggtctcgcggtatcattgcagcactggggccagatggtaagccctcccgtatcgtagttatctacacgacggggagtcaggcaactatggatgaacgaaatagacagatcgctgagataggtgcctcactgattaagcattggtaactgtcagaccaagtttactcatatatactttagattgatttaaaacttcatttttaatttaaaaggatctaggtgaagatcctttttgataatctcatgaccaaaatcccttaacgtgagttttcgttccactgagcgtcagaccccgtagaaaagatcaaaggatcttcttgagatcctttttttctgcgcgtaatctgctgcttgcaaacaaaaaaaccaccgctaccagcggtggtttgtttgccggatcaagagctaccaactctttttccgaaggtaactggcttcagcagagcgcagataccaaatactgtccttctagtgtagccgtagttaggccaccacttcaagaactctgtagcaccgcctacatacctcgctctgctaatcctgttaccagtggctgctgccagtggcgataagtcgtgtcttaccgggttggactcaagacgatagttaccggataaggcgcagcggtcgggctgaacggggggttcgtgcacacagcccagcttggagcgaacgacctacaccgaactgagatacctacagcgtgagctatgagaaagcgccacgcttcccgaagggagaaaggcggacaggtatccggtaagcggcagggtcggaacaggagagcgcacgagggagcttccagggggaaacgcctggtatctttatagtcctgtcgggtttcgccacctctgacttgagcgtcgatttttgtgatgctcgtcaggggggcggagcctatggaaaaacgccagcaacgcggcctttttacggttcctggccttttgctggccttttgctcacatgttctttcctgcgttatcccctgattctgtggataaccgtattaccgcctttgagtgagctgataccgctcgccgcagccgaacgaccgagcgcagcgagtcagtgagcgaggaagcggaagagcgcccaatacgcaaaccgcctctccccgcgcgttggccgattcattaatgcagctgtggaatgtgtgtcagttagggtgtggaaagtccccaggctccccagcaggcagaagtatgcaaagcatgcatctcaattagtcagcaaccaggtgtggaaagtccccaggctccccagcaggcagaagtatgcaaagcatgcatctcaattagtcagcaaccatagtcccgcccctaactccgcccatcccgcccctaactccgcccagttccgcccattctccgccccatggctgactaattttttttatttatgcagaggccgaggccgcctcggcctctgagctattccagaagtagtgaggaggcttttttggaggcctaggcttttgcaaaaagcttggacacaagacaggcttgcgagatatgtttgagaataccactttatcccgcgtcagggagaggcagtgcgtaaaaagacgcggactcatgtgaaatactggtttttagtgcgccagatctctataatctcgcgcaacctattttcccctcgaacactttttaagccgtagataaacaggctgggacacttcacatgagcgaaaaatacatcgtcacctgggacatgttgcagatccatgcacgtaaactcgcaagccgactgatgccttctgaacaatggaaaggcattattgccgtaagccgtggcggtctgtaccgggtgcgttactggcgcgtgaactgggtattcgtcatgtcgataccgtttgtatttccagctacgatcacgacaaccagcgcgagcttaaagtgctgaaacgcgcagaaggcgatggcgaaggcttcatcgttattgatgacctggtggataccggtggtactgcggttgcgattcgtgaaatgtatccaaaagcgcactttgtcaccatcttcgcaaaaccggctggtcgtccgctggttgatgactatgttgttgatatcccgcaagatacctggattgaacagccgtgggatatgggcgtcgtattcgtcccgccaatctccggtcgctaatcttttcaacgcctggcactgccgggcgttgttctttttaacttcaggcgggttacaatagtttccagtaagtattctggaggctgcatccatgacacaggcaaacctgagcgaaaccctgttcaaaccccgctttaaacatcctgaaacctcgacgctagtccgccgctttaatcacggcgcacaaccgcctgtgcagtcggcccttgatggtaaaaccatccctcactggtatcgcatgattaaccgtctgatgtggatctggcgcggcattgacccacgcgaaatcctcgacgtccaggcacgtattgtgatgagcgatgccgaacgtaccgacgatgatttatacgatacggtgattggctaccgtggcggcaactggatttatgagtgggccccggatctttgtgaaggaaccttacttctgtggtgtgacataattggacaaactacctacagagatttaaagctctaaggtaaatataaaatttttaagtgtataatgtgttaaactactgattctaattgtttgtgtattttagattccaacctatggaactgatgaatgggagcagtggtggaatgcctttaatgaggaaaacctgttttgctcagaagaaatgccatctagtgatgatgaggctactgctgactctcaacattctactcctccaaaaaagaagagaaaggtagaagaccccaaggactttccttcagaattgctaagttttttgagtcatgctgtgtttagtaatagaactcttgcttgctttgctatttacaccacaaaggaaaaagctgcactgctatacaagaaaattatggaaaaatattctgtaacctttataagtaggcataacagttataatcataacatactgttttttcttactccacacaggcatagagtgtctgctattaataactatgctcaaaaattgtgtacctttagctttttaatttgtaaaggggttaataaggaatatttgatgtatagtgccttgactagagatcataatcagccataccacatttgtagaggttttacttgctttaaaaaacctcccacacctccccctgaacctgaaacataaaatgaatgcaattgttgttgttaacttgtttattgcagcttataatggttacaaataaagcaatagcatcacaaatttcacaaataaagcatttttttcactgcattctagttgtggtttgtccaaactcatcaatgtatcttatcatgtctggatcaactggataactcaagctaaccaaaatcatcccaaacttcccaccccataccctattaccactgccaattacctagtggtttcatttactctaaacctgtgattcctctgaattattttcattttaaagaaattgtatttgttaaatatgtactacaaacttagtagttggaagggctaattcactcccaaagaagacaagatatccttgatctgtggatctaccacacacaaggctacttccctgattagcagaactacacaccagggccaggggtcagatatccactgacctttggatggtgctacaagctagtaccagttgagccagataaggtagaagaggccaataaaggagagaacaccagcttgttacaccctgtgagcctgcatgggatggatgacccggagagagaagtgttagagtggaggtttgacagccgcctagcatttcatcacgtggcccgagagctgcatccggagtacttcaagaactgctgatatcgagcttgctacaagggactttccgctggggactttccagggaggcgtggcctgggcgggactggggagtggcgagccctcagatcctgcatataagcagctgctttttgcctgtactgggtctctctggttagaccagatctgagcctgggagctctctggctaactagggaacccactgcttaagcctcaataaagcttgccttgagtgcttcaagtagtgtgtgcccgtctgttgtgtgactctggtaactagagatccctcagacccttttagtcagtgtggaaaatctctagcagtggcgcccgaacagggacttgaaagcgaaagggaaaccagaggagctctctcgacgcaggactcggcttgctgaagcgcgcacggcaagaggcgaggggcggcgactggtgagtacgccaaaaattttgactagcggaggctagaaggagagagatgggtgcgagagcgtcagtattaagcgggggagaattagatcgcgatgggaaaaaattcggttaaggccagggggaaagaaaaaatataaattaaaacatatagtatgggcaagcagggagctagaacgattcgcagttaatcctggcctgttagaaacatcagaaggctgtagacaaatactgggacagctacaaccatcccttcagacaggatcagaagaacttagatcattatataatacagtagcaaccctctattgtgtgcatcaaaggatagagataaaagacaccaaggaagctttagacaagatagaggaagagcaaaacaaaagtaagaccaccgcacagcaagcggccggtgatcttcagacctggacgatatatatgagggacaattggagaagtgaattatataaatataaagtagtaaaaattgaaccattaggagtagcacccaccaaggcaaagagaagagtggtgcagagagaaaaaagagcagtgggaataggagctttgttccttgggttcttgggagcagcaggaagcactatgggcgcagcgtcaatgacgctgacggtacaggccagacaattattgtctggtatagtgcagcagcagaacaatttgctgagggctattgaggcgcaacagcatctgttgcaactcacagtctggggcatcaagcagctccaggcaagaatcctggctgtggaaagatacctaaaggatcaacagctcctggggatttggggttgctctggaaaactcatttgcaccactgctgtgccttggaatgctagttggagtaataaatctctggaacagatttggaatcacacgacctggatggagtgggacagagaaattaacaattacacaagcttaatacactccttaattgaagaatcgcaaaaccagcaagaaaagaatgaacaagaattattggaattagataaatgggcaagtttgtggaattggtttaacataacaaattggctgtggtatataaaattattcataatgatagtaggaggcttggtaggtttaagaatagtttttgctgtactttctatagtgaatagagttaggcagggatattcaccattatcgtttcagacccacctcccaaccccgaggggacccgacaggcccgaaggaatagaagaagaaggtggagagagagacagagacagatccattcgattagtgaacggatctcgacggtcgccaaatggcagtattcatccacaattttaaaagaaaaggggggattggggggtacagtgcaggggaaagaatagtagacataatagcaacagacatacaaactaaagaattacaaaaacaaattacaaaaattcaaaattttcgggtttattacagggacagcagagatccagtttggatcgataagcttgatatcgaattgggtaggggaggcgcttttcccaaggcagtctggagcatgcgctttagcagccccgctgggcacttggcgctacacaagtggcctctggcctcgcacacattccacatccaccggtaggcgccaaccggctccgttctttggtggccccttcgcgccaccttctactcctcccctagtcaggaagttcccccccgccccgcagctcgcgtcgtgcaggacgtgacaaatggaagtagcacgtctcactagtctcgtgcagatggacagcaccgctgagcaatggaagcgggtaggcctttggggcagcggccaatagcagctttgctccttcgctttctgggctcagaggctgggaaggggtgggtccgggggcgggctcaggggcgggctcaggggcggggcgggcgcccgaaggtcctccggaggcccggcattctgcacgcttcaaaagcgcacgtctgccgcgctgttctcctcttcctcatctccgggcctttcgaattctcacgcgtcaagtggagcaaggcaggtggacagtggatccttgacttgcggccgcaactcccacctgcaacatgcgtgactgactgaggccgcgactctagagtcgacctgcaggcatgcaagcttgatatcaagcttatcgataatcaacctctggattacaaaatttgtgaaagattgactggtattcttaactatgttgctccttttacgctatgtggatacgctgctttaatgcctttgtatcatgctattgcttcccgtatggctttcattttctcctccttgtataaatcctggttgctgtctctttatgaggagttgtggcccgttgtcaggcaacgtggcgtggtgtgcactgtgtttgctgacgcaacccccactggttggggcattgccaccacctgtcagctcctttccgggactttcgctttccccctccctattgccacggcggaactcatcgccgcctgccttgcccgctgctggacaggggctcggctgttgggcactgacaattccgtggtgttgtcggggaaatcatcgtcctttccttggctgctcgcctgtgttgccacctggattctgcgcgggacgtccttctgctacgtcccttcggccctcaatccagcggaccttccttcccgcggcctgctgccggctctgcggcctcttccgcgtcttcgccttcgccctcagacgagtcggatctccctttgggccgcctccccgcat

SEQ ID NO: 211 - protein, 4 aa, Artificial sequence
  Synthetic construct
  MISC_FEATURE (2)..(3): X can be any amino acid residue
  MISC_FEATURE (4)..(4): X represents a hydrophobic residue such as Leu, Ile, Val, Phe, Trp, Tyr, Val, Met, and Pro
PXXX

SEQ ID NO: 212 - protein, 5 aa, Artificial sequence
  Synthetic construct
  MISC_FEATURE (2)..(3): X can be any amino acid residue
  MISC_FEATURE (4)..(4): X represents a hydrophobic residue such as Leu, Ile, Val, Phe, Trp, Tyr, Val, Met, and Pro
  MISC_FEATURE (5)..(5): X is either Ser or Thr
PXXXX

SEQ ID NO: 213 - protein, 6 aa, Artificial sequence
  Synthetic construct
  MISC_FEATURE (2)..(2): X is either Leu or Gln
PXGMTS

SEQ ID NO: 214 - protein, 5 aa, Artificial sequence
  Synthetic construct
  MISC_FEATURE (2)..(2): X is either Leu or Gln
PXGMT

SEQ ID NO: 215 - protein, 3 aa, Artificial sequence
  Synthetic construct
VGR

SEQ ID NO: 216 - protein, 7 aa, Artificial sequence
  Synthetic construct
ENLYTQS

SEQ ID NO: 217 - protein, 5 aa, Artificial sequence
  Synthetic construct
DDDDK

SEQ ID NO: 218 - protein, 4 aa, Artificial sequence
  Synthetic construct
LVPR

SEQ ID NO: 219 - protein, 556 aa, Artificial sequence
  Synthetic construct
MALPVTALLLPLALLLHAARPEQKLISEEDLDIQMTQTTSSLSASLGDRVTISCRASQDISKYLNWYQQKPDGTVKLLIYHTSRLHSGVPSRFSGSGSGTDYSLTISNLEQEDIATYFCQQGNTLPYTFGGGTKLEITGGGGSGGGGSGGGGSEVKLQESGPGLVAPSQSLSVTCTVSGVSLPDYGVSWIRQPPRKGLEWLGVIWGSETTYYNSALKSRLTIIKDNSKSQVFLKMNSLQTDDTAIYYCAKHYYYGGSYAMDYWGQGTSVTVSSTTTPAPRPPTPAPTIASQPLSLRPEACRPAAGGAVHTRGLDFACDFMYVAAAAFVLLFFVGCGVLLSRKRRRMKLLSSIEQACDICRLKKLKCSKEKPKCAKCLKNNWECRYSPKTKRSPLTRAHLTEVESRLERLEQLFLLIFPREDLDMILKMDSLQDIKALLTGLFVQDNVNKDAVTDRLASVETDMPLTLRQHRISATSSSEESSNKGQRQLTVSAAAGGSGGSGGSDALDDFDLDMLGSDALDDFDLDMLGSDALDDFDLDMLGSDALDDFDLDMLGS

SEQ ID NO: 220 - protein, 550 aa, Artificial sequence
  Synthetic construct
MALPVTALLLPLALLLHAARPEQKLISEEDLDIQMTQTTSSLSASLGDRVTISCRASQDISKYLNWYQQKPDGTVKLLIYHTSRLHSGVPSRFSGSGSGTDYSLTISNLEQEDIATYFCQQGNTLPYTFGGGTKLEITGGGGSGGGGSGGGGSEVKLQESGPGLVAPSQSLSVTCTVSGVSLPDYGVSWIRQPPRKGLEWLGVIWGSETTYYNSALKSRLTIIKDNSKSQVFLKMNSLQTDDTAIYYCAKHYYYGGSYAMDYWGQGTSVTVSSIEVMYPPPYLDNEKSNGTIIHVKGKHLCPSPLFPGPSKPFMYVAAAAFVLLFFVGCGVLLSRKRRRMKLLSSIEQACDICRLKKLKCSKEKPKCAKCLKNNWECRYSPKTKRSPLTRAHLTEVESRLERLEQLFLLIFPREDLDMILKMDSLQDIKALLTGLFVQDNVNKDAVTDRLASVETDMPLTLRQHRISATSSSEESSNKGQRQLTVSAAAGGSGGSGGSDALDDFDLDMLGSDALDDFDLDMLGSDALDDFDLDMLGSDALDDFDLDMLGS

SEQ ID NO: 221 - protein, 538 aa, Artificial sequence
  Synthetic construct
MALPVTALLLPLALLLHAARPEQKLISEEDLDIQMTQTTSSLSASLGDRVTISCRASQDISKYLNWYQQKPDGTVKLLIYHTSRLHSGVPSRFSGSGSGTDYSLTISNLEQEDIATYFCQQGNTLPYTFGGGTKLEITGGGGSGGGGSGGGGSEVKLQESGPGLVAPSQSLSVTCTVSGVSLPDYGVSWIRQPPRKGLEWLGVIWGSETTYYNSALKSRLTIIKDNSKSQVFLKMNSLQTDDTAIYYCAKHYYYGGSYAMDYWGQGTSVTVSSGGGGSGGGGSGGGGSESKYGPPCPPCPFMYVAAAAFVLLFFVGCGVLLSRKRRRMKLLSSIEQACDICRLKKLKCSKEKPKCAKCLKNNWECRYSPKTKRSPLTRAHLTEVESRLERLEQLFLLIFPREDLDMILKMDSLQDIKALLTGLFVQDNVNKDAVTDRLASVETDMPLTLRQHRISATSSSEESSNKGQRQLTVSAAAGGSGGSGGSDALDDFDLDMLGSDALDDFDLDMLGSDALDDFDLDMLGSDALDDFDLDMLGS

SEQ ID NO: 222 - protein, 697 aa, Artificial sequence
  Synthetic construct
MALPVTALLLPLALLLHAARPEQKLISEEDLDIQMTQTTSSLSASLGDRVTISCRASQDISKYLNWYQQKPDGTVKLLIYHTSRLHSGVPSRFSGSGSGTDYSLTISNLEQEDIATYFCQQGNTLPYTFGGGTKLEITGGGGSGGGGSGGGGSEVKLQESGPGLVAPSQSLSVTCTVSGVSLPDYGVSWIRQPPRKGLEWLGVIWGSETTYYNSALKSRLTIIKDNSKSQVFLKMNSLQTDDTAIYYCAKHYYYGGSYAMDYWGQGTSVTVSSLHCVGDTYPSNDRCCHECRPGNGMVSRCSRSQNTVCRPCGPGFYNDVVSSKPCKPCTWCNLRSGSERKQLCTATQDTVCRCRAGTQPLDSYKPGVDCAPCPPGHFSPGDNQACKPWTNCTLAGKHTLQPASNSSDAICEDRDPPATQPQETQGPPARPITVQPTEAWPRTSQGPSTRPVEVPGGRAFMYVAAAAFVLLFFVGCGVLLSRKRRRMKLLSSIEQACDICRLKKLKCSKEKPKCAKCLKNNWECRYSPKTKRSPLTRAHLTEVESRLERLEQLFLLIFPREDLDMILKMDSLQDIKALLTGLFVQDNVNKDAVTDRLASVETDMPLTLRQHRISATSSSEESSNKGQRQLTVSAAAGGSGGSGGSDALDDFDLDMLGSDALDDFDLDMLGSDALDDFDLDMLGSDALDDFDLDMLGS

SEQ ID NO: 223 - protein, 542 aa, Artificial sequence
  Synthetic construct
MALPVTALLLPLALLLHAARPEQKLISEEDLQVQLQQSGGGLVKPGGSLRLSCAASGFTFSSYAMHWVRQAPGKGLEWVAVISYDGSNKYYADSVKGRFTISRDNSKNTLYLQMDSLRAEDTAVYYCAKEGDSSRWSYDLWGRGTLVTVSSGGGGSGGGGSGGGGSQSALTQPASVSGSPGQSITISCTGTSSDVGGYNYVSWYQQHPGKAPKVMIYDVTNRPSGVSNRFSGSKSGNTASLTISGLQAEDEADYYCSSYTIASTLVVFGGGTKLTVLTTTPAPRPPTPAPTIASQPLSLRPEACFMYVAAAAFVLLFFVGCGVLLSRKRRRMKLLSSIEQACDICRLKKLKCSKEKPKCAKCLKNNWECRYSPKTKRSPLTRAHLTEVESRLERLEQLFLLIFPREDLDMILKMDSLQDIKALLTGLFVQDNVNKDAVTDRLASVETDMPLTLRQHRISATSSSEESSNKGQRQLTVSAAAGGSGGSGGSDALDDFDLDMLGSDALDDFDLDMLGSDALDDFDLDMLGSDALDDFDLDMLGS

SEQ ID NO: 224 - protein, 525 aa, Artificial sequence
  Synthetic construct
METDTLLLWVLLLWVPGSTGDMVSKGEELFTGVVPILVELDGDVNGHKFSVSGEGEGDATYGKLTLKFICTTGKLPVPWPTLVTTLTYGVQCFSRYPDHMKQHDFFKSAMPEGYVQERTIFFKDDGNYKTRAEVKFEGDTLVNRIELKGIDFKEDGNILGHKLEYNYNSHNVYIMADKQKNGIKVNFKIRHNIEDGSVQLADHYQQNTPIGDGPVLLPDNHYLSTQSALSKDPNEKRDHMVLLEFVTAAGITLGMDELYKTTTPAPRPPTPAPTIASQPLSLRPEACFMYVAAAAFVLLFFVGCGVLLSRKRRRMKLLSSIEQACDICRLKKLKCSKEKPKCAKCLKNNWECRYSPKTKRSPLTRAHLTEVESRLERLEQLFLLIFPREDLDMILKMDSLQDIKALLTGLFVQDNVNKDAVTDRLASVETDMPLTLRQHRISATSSSEESSNKGQRQLTVSAAAGGSGGSGGSDALDDFDLDMLGSDALDDFDLDMLGSDALDDFDLDMLGSDALDDFDLDMLGS

SEQ ID NO: 225 - protein, 537 aa, Artificial sequence
  Synthetic construct
MALPVTALLLPLALLLHAARPEQKLISEEDLDIQMTQTTSSLSASLGDRVTISCRASQDISKYLNWYQQKPDGTVKLLIYHTSRLHSGVPSRFSGSGSGTDYSLTISNLEQEDIATYFCQQGNTLPYTFGGGTKLEITGGGGSGGGGSGGGGSEVKLQESGPGLVAPSQSLSVTCTVSGVSLPDYGVSWIRQPPRKGLEWLGVIWGSETTYYNSALKSRLTIIKDNSKSQVFLKMNSLQTDDTAIYYCAKHYYYGGSYAMDYWGQGTSVTVSSTTTPAPRPPTPAPTIASQPLSLRPEAFMYVAAAAFVLLFFVGCGVLLSRKRRRMKLLSSIEQACDICRLKKLKCSKEKPKCAKCLKNNWECRYSPKTKRSPLTRAHLTEVESRLERLEQLFLLIFPREDLDMILKMDSLQDIKALLTGLFVQDNVNKDAVTDRLASVETDMPLTLRQHRISATSSSEESSNKGQRQLTVSAAAGGSGGSGGSDALDDFDLDMLGSDALDDFDLDMLGSDALDDFDLDMLGSDALDDFDLDMLGS

SEQ ID NO: 226 - protein, 529 aa, Artificial sequence
  Synthetic construct
MALPVTALLLPLALLLHAARPEQKLISEEDLDIQMTQTTSSLSASLGDRVTISCRASQDISKYLNWYQQKPDGTVKLLIYHTSRLHSGVPSRFSGSGSGTDYSLTISNLEQEDIATYFCQQGNTLPYTFGGGTKLEITGGGGSGGGGSGGGGSEVKLQESGPGLVAPSQSLSVTCTVSGVSLPDYGVSWIRQPPRKGLEWLGVIWGSETTYYNSALKSRLTIIKDNSKSQVFLKMNSLQTDDTAIYYCAKHYYYGGSYAMDYWGQGTSVTVSSRPAAGGAVHTRGLDFACDFMYVAAAAFVLLFFVGCGVLLSRKRRRMKLLSSIEQACDICRLKKLKCSKEKPKCAKCLKNNWECRYSPKTKRSPLTRAHLTEVESRLERLEQLFLLIFPREDLDMILKMDSLQDIKALLTGLFVQDNVNKDAVTDRLASVETDMPLTLRQHRISATSSSEESSNKGQRQLTVSAAAGGSGGSGGSDALDDFDLDMLGSDALDDFDLDMLGSDALDDFDLDMLGSDALDDFDLDMLGS

SEQ ID NO: 227 - protein, 530 aa, Artificial sequence
  Synthetic construct
MALPVTALLLPLALLLHAARPEQKLISEEDLDIQMTQTTSSLSASLGDRVTISCRASQDISKYLNWYQQKPDGTVKLLIYHTSRLHSGVPSRFSGSGSGTDYSLTISNLEQEDIATYFCQQGNTLPYTFGGGTKLEITGGGGSGGGGSGGGGSEVKLQESGPGLVAPSQSLSVTCTVSGVSLPDYGVSWIRQPPRKGLEWLGVIWGSETTYYNSALKSRLTIIKDNSKSQVFLKMNSLQTDDTAIYYCAKHYYYGGSYAMDYWGQGTSVTVSSCRPAAGGAVHTRGLDFACDFMYVAAAAFVLLFFVGCGVLLSRKRRRMKLLSSIEQACDICRLKKLKCSKEKPKCAKCLKNNWECRYSPKTKRSPLTRAHLTEVESRLERLEQLFLLIFPREDLDMILKMDSLQDIKALLTGLFVQDNVNKDAVTDRLASVETDMPLTLRQHRISATSSSEESSNKGQRQLTVSAAAGGSGGSGGSDALDDFDLDMLGSDALDDFDLDMLGSDALDDFDLDMLGSDALDDFDLDMLGS

SEQ ID NO: 228 - protein, 543 aa, Artificial sequence
  Synthetic construct
MALPVTALLLPLALLLHAARPEQKLISEEDLQVQLQQSGGGLVKPGGSLRLSCAASGFTFSSYAMHWVRQAPGKGLEWVAVISYDGSNKYYADSVKGRFTISRDNSKNTLYLQMDSLRAEDTAVYYCAKEGDSSRWSYDLWGRGTLVTVSSGGGGSGGGGSGGGGSQSALTQPASVSGSPGQSITISCTGTSSDVGGYNYVSWYQQHPGKAPKVMIYDVTNRPSGVSNRFSGSKSGNTASLTISGLQAEDEADYYCSSYTIASTLVVFGGGTKLTVLTTTPAPRPPTPAPTIASQPLSLRPEACFMYVAAAAFVLLFFVGCGVLLSKRKRKHMKLLSSIEQACDICRLKKLKCSKEKPKCAKCLKNNWECRYSPKTKRSPLTRAHLTEVESRLERLEQLFLLIFPREDLDMILKMDSLQDIKALLTGLFVQDNVNKDAVTDRLASVETDMPLTLRQHRISATSSSEESSNKGQRQLTVSAAAGGSGGSGGSDALDDFDLDMLGSDALDDFDLDMLGSDALDDFDLDMLGSDALDDFDLDMLGS

SEQ ID NO: 229 - protein, 542 aa, Artificial sequence
  Synthetic construct
MALPVTALLLPLALLLHAARPEQKLISEEDLQVQLVQSGAEVKKPGASVKVSCKASGYSFPDYYINWVRQAPGQGLEWMGWIYFASGNSEYNQKFTGRVTMTRDTSINTAYMELSSLTSEDTAVYFCASLYDYDWYFDVWGQGTMVTVSSGGGGSGGGGSGGGGSDIVMTQTPLSLSVTPGQPASISCKSSQSLVHSNGNTYLHWYLQKPGQSPQLLIYKVSNRFSGVPDRFSGSGSGTDFTLKISRVEAEDVGIYYCSQSSIYPWTFGQGTKLEIKTTTPAPRPPTPAPTIASQPLSLRPEACFMYVAAAAFVLLFFVGCGVLLSRKRRRMKLLSSIEQACDICRLKKLKCSKEKPKCAKCLKNNWECRYSPKTKRSPLTRAHLTEVESRLERLEQLFLLIFPREDLDMILKMDSLQDIKALLTGLFVQDNVNKDAVTDRLASVETDMPLTLRQHRISATSSSEESSNKGQRQLTVSAAAGGSGGSGGSDALDDFDLDMLGSDALDDFDLDMLGSDALDDFDLDMLGSDALDDFDLDMLGS

SEQ ID NO: 230 - protein, 543 aa, Artificial sequence
  Synthetic construct
MALPVTALLLPLALLLHAARPEQKLISEEDLQVQLVQSGAEVKKPGASVKVSCKASGYSFPDYYINWVRQAPGQGLEWMGWIYFASGNSEYNQKFTGRVTMTRDTSINTAYMELSSLTSEDTAVYFCASLYDYDWYFDVWGQGTMVTVSSGGGGSGGGGSGGGGSDIVMTQTPLSLSVTPGQPASISCKSSQSLVHSNGNTYLHWYLQKPGQSPQLLIYKVSNRFSGVPDRFSGSGSGTDFTLKISRVEAEDVGIYYCSQSSIYPWTFGQGTKLEIKTTTPAPRPPTPAPTIASQPLSLRPEACFMYVAAAAFVLLFFVGCGVLLSKRKRKHMKLLSSIEQACDICRLKKLKCSKEKPKCAKCLKNNWECRYSPKTKRSPLTRAHLTEVESRLERLEQLFLLIFPREDLDMILKMDSLQDIKALLTGLFVQDNVNKDAVTDRLASVETDMPLTLRQHRISATSSSEESSNKGQRQLTVSAAAGGSGGSGGSDALDDFDLDMLGSDALDDFDLDMLGSDALDDFDLDMLGSDALDDFDLDMLGS

SEQ ID NO: 231 - protein, 542 aa, Artificial sequence
  Synthetic construct
MALPVTALLLPLALLLHAARPEQKLISEEDLDIQMTQSPSSLSASVGDRVTITCRASQDVNTAVAWYQQKPGKAPKLLIYSASFLYSGVPSRFSGSRSGTDFTLTISSLQPEDFATYYCQQHYTTPPTFGQGTKVEIKRTGSTSGSGKPGSGEGSEVQLVESGGGLVQPGGSLRLSCAASGFNIKDTYIHWVRQAPGKGLEWVARIYPTNGYTRYADSVKGRFTISADTSKNTAYLQMNSLRAEDTAVYYCSRWGGDGFYAMDVWGQGTLVTVSSGSTTTPAPRPPTPAPTIASQPLSLRPEACFMYVAAAAFVLLFFVGCGVLLSRKRRRMKLLSSIEQACDICRLKKLKCSKEKPKCAKCLKNNWECRYSPKTKRSPLTRAHLTEVESRLERLEQLFLLIFPREDLDMILKMDSLQDIKALLTGLFVQDNVNKDAVTDRLASVETDMPLTLRQHRISATSSSEESSNKGQRQLTVSAAAGGSGGSGGSDALDDFDLDMLGSDALDDFDLDMLGSDALDDFDLDMLGSDALDDFDLDMLGS

SEQ ID NO: 232 - protein, 543 aa, Artificial sequence
  Synthetic construct
MALPVTALLLPLALLLHAARPEQKLISEEDLDIQMTQSPSSLSASVGDRVTITCRASQDVNTAVAWYQQKPGKAPKLLIYSASFLYSGVPSRFSGSRSGTDFTLTISSLQPEDFATYYCQQHYTTPPTFGQGTKVEIKRTGSTSGSGKPGSGEGSEVQLVESGGGLVQPGGSLRLSCAASGFNIKDTYIHWVRQAPGKGLEWVARIYPTNGYTRYADSVKGRFTISADTSKNTAYLQMNSLRAEDTAVYYCSRWGGDGFYAMDVWGQGTLVTVSSGSTTTPAPRPPTPAPTIASQPLSLRPEACFMYVAAAAFVLLFFVGCGVLLSKRKRKHMKLLSSIEQACDICRLKKLKCSKEKPKCAKCLKNNWECRYSPKTKRSPLTRAHLTEVESRLERLEQLFLLIFPREDLDMILKMDSLQDIKALLTGLFVQDNVNKDAVTDRLASVETDMPLTLRQHRISATSSSEESSNKGQRQLTVSAAAGGSGGSGGSDALDDFDLDMLGSDALDDFDLDMLGSDALDDFDLDMLGSDALDDFDLDMLGS

SEQ ID NO: 233 - protein, 542 aa, Artificial sequence
  Synthetic construct
MALPVTALLLPLALLLHAARPEQKLISEEDLDIQMTQSPSSLSASVGDRVTITCRASQDVNTAVAWYQQKPGKAPKLLIYSASFLESGVPSRFSGSRSGTDFTLTISSLQPEDFATYYCQQHYTTPPTFGQGTKVEIKRTGSTSGSGKPGSGEGSEVQLVESGGGLVQPGGSLRLSCAASGFNIKDTYIHWVRQAPGKGLEWVARIYPTNGYTRYADSVKGRFTISADTSKNTAYLQMNSLRAEDTAVYYCSRWGGDGFYAMDVWGQGTLVTVSSGSTTTPAPRPPTPAPTIASQPLSLRPEACFMYVAAAAFVLLFFVGCGVLLSRKRRRMKLLSSIEQACDICRLKKLKCSKEKPKCAKCLKNNWECRYSPKTKRSPLTRAHLTEVESRLERLEQLFLLIFPREDLDMILKMDSLQDIKALLTGLFVQDNVNKDAVTDRLASVETDMPLTLRQHRISATSSSEESSNKGQRQLTVSAAAGGSGGSGGSDALDDFDLDMLGSDALDDFDLDMLGSDALDDFDLDMLGSDALDDFDLDMLGS

SEQ ID NO: 234 - protein, 543 aa, Artificial sequence
  Synthetic construct
MALPVTALLLPLALLLHAARPEQKLISEEDLDIQMTQSPSSLSASVGDRVTITCRASQDVNTAVAWYQQKPGKAPKLLIYSASFLESGVPSRFSGSRSGTDFTLTISSLQPEDFATYYCQQHYTTPPTFGQGTKVEIKRTGSTSGSGKPGSGEGSEVQLVESGGGLVQPGGSLRLSCAASGFNIKDTYIHWVRQAPGKGLEWVARIYPTNGYTRYADSVKGRFTISADTSKNTAYLQMNSLRAEDTAVYYCSRWGGDGFYAMDVWGQGTLVTVSSGSTTTPAPRPPTPAPTIASQPLSLRPEACFMYVAAAAFVLLFFVGCGVLLSKRKRKHMKLLSSIEQACDICRLKKLKCSKEKPKCAKCLKNNWECRYSPKTKRSPLTRAHLTEVESRLERLEQLFLLIFPREDLDMILKMDSLQDIKALLTGLFVQDNVNKDAVTDRLASVETDMPLTLRQHRISATSSSEESSNKGQRQLTVSAAAGGSGGSGGSDALDDFDLDMLGSDALDDFDLDMLGSDALDDFDLDMLGSDALDDFDLDMLGS

SEQ ID NO: 235 - protein, 416 aa, Artificial sequence
  Synthetic construct
MALPVTALLLPLALLLHAARPDYKDDDDKEVQLLESGGGLVQPGGSLRLSCAASGFTFSSYAMSWVRQAPGKGLEWVSSISGSGDYIYYADSVKGRFTISRDISKNTLYLQMNSLRAEDTAVYYCAKEGTGANSSLADYRGQGTLVTVSSTTTPAPRPPTPAPTIASQPLSLRPEACFMYVAAAAFVLLFFVGCGVLLSKRKRKHMKLLSSIEQACDICRLKKLKCSKEKPKCAKCLKNNWECRYSPKTKRSPLTRAHLTEVESRLERLEQLFLLIFPREDLDMILKMDSLQDIKALLTGLFVQDNVNKDAVTDRLASVETDMPLTLRQHRISATSSSEESSNKGQRQLTVSAAAGGSGGSGGSDALDDFDLDMLGSDALDDFDLDMLGSDALDDFDLDMLGSDALDDFDLDMLGS

SEQ ID NO: 236 - protein, 426 aa, Artificial sequence
  Synthetic construct
MALPVTALLLPLALLLHAARPDYKDDDDKEVQLLESGGGLVQPGGSLRLSCAASGFTFSSYAMSWVRQAPGKGLEWVSSISGSGDYIYYADSVKGRFTISRDISKNTLYLQMNSLRAEDTAVYYCAKEGTGANSSLADYRGQGTLVTVSSFVPVFLPAKPTTTPAPRPPTPAPTIASQPLSLRPEACFMYVAAAAFVLLFFVGCGVLLSKRKRKHMKLLSSIEQACDICRLKKLKCSKEKPKCAKCLKNNWECRYSPKTKRSPLTRAHLTEVESRLERLEQLFLLIFPREDLDMILKMDSLQDIKALLTGLFVQDNVNKDAVTDRLASVETDMPLTLRQHRISATSSSEESSNKGQRQLTVSAAAGGSGGSGGSDALDDFDLDMLGSDALDDFDLDMLGSDALDDFDLDMLGSDALDDFDLDMLGS

SEQ ID NO: 237 - protein, 543 aa, Artificial sequence
  Synthetic construct
MALPVTALLLPLALLLHAARPEQKLISEEDLDIQMTQTTSSLSASLGDRVTISCRASQDISKYLNWYQQKPDGTVKLLIYHTSRLHSGVPSRFSGSGSGTDYSLTISNLEQEDIATYFCQQGNTLPYTFGGGTKLEITGGGGSGGGGSGGGGSEVKLQESGPGLVAPSQSLSVTCTVSGVSLPDYGVSWIRQPPRKGLEWLGVIWGSETTYYNSALKSRLTIIKDNSKSQVFLKMNSLQTDDTAIYYCAKHYYYGGSYAMDYWGQGTSVTVSSTTTPAPRPPTPAPTIASQPLSLRPEACATVVIVVCVSFLVFMIILGVFRIRAAHRRTMRMKLLSSIEQACDICRLKKLKCSKEKPKCAKCLKNNWECRYSPKTKRSPLTRAHLTEVESRLERLEQLFLLIFPREDLDMILKMDSLQDIKALLTGLFVQDNVNKDAVTDRLASVETDMPLTLRQHRISATSSSEESSNKGQRQLTVSAAAGGSGGSGGSDALDDFDLDMLGSDALDDFDLDMLGSDALDDFDLDMLGSDALDDFDLDMLGS

SEQ ID NO: 238 - protein, 541 aa, Artificial sequence
  Synthetic construct
MALPVTALLLPLALLLHAARPEQKLISEEDLDIQMTQTTSSLSASLGDRVTISCRASQDISKYLNWYQQKPDGTVKLLIYHTSRLHSGVPSRFSGSGSGTDYSLTISNLEQEDIATYFCQQGNTLPYTFGGGTKLEITGGGGSGGGGSGGGGSEVKLQESGPGLVAPSQSLSVTCTVSGVSLPDYGVSWIRQPPRKGLEWLGVIWGSETTYYNSALKSRLTIIKDNSKSQVFLKMNSLQTDDTAIYYCAKHYYYGGSYAMDYWGQGTSVTVSSTTTPAPRPPTPAPTIASQPLSLRPEACIATVVIIISVCMLVFVVAMGVYRVRIAHQHMKLLSSIEQACDICRLKKLKCSKEKPKCAKCLKNNWECRYSPKTKRSPLTRAHLTEVESRLERLEQLFLLIFPREDLDMILKMDSLQDIKALLTGLFVQDNVNKDAVTDRLASVETDMPLTLRQHRISATSSSEESSNKGQRQLTVSAAAGGSGGSGGSDALDDFDLDMLGSDALDDFDLDMLGSDALDDFDLDMLGSDALDDFDLDMLGS

SEQ ID NO: 239 - protein, 537 aa, Artificial sequence
  Synthetic construct
MALPVTALLLPLALLLHAARPEQKLISEEDLDIQMTQTTSSLSASLGDRVTISCRASQDISKYLNWYQQKPDGTVKLLIYHTSRLHSGVPSRFSGSGSGTDYSLTISNLEQEDIATYFCQQGNTLPYTFGGGTKLEITGGGGSGGGGSGGGGSEVKLQESGPGLVAPSQSLSVTCTVSGVSLPDYGVSWIRQPPRKGLEWLGVIWGSETTYYNSALKSRLTIIKDNSKSQVFLKMNSLQTDDTAIYYCAKHYYYGGSYAMDYWGQGTSVTVSSTTTPAPRPPTPAPTIASQPLSLRPEACATVVIVVCVSFLVFMIILGVFRKRRRMKLLSSIEQACDICRLKKLKCSKEKPKCAKCLKNNWECRYSPKTKRSPLTRAHLTEVESRLERLEQLFLLIFPREDLDMILKMDSLQDIKALLTGLFVQDNVNKDAVTDRLASVETDMPLTLRQHRISATSSSEESSNKGQRQLTVSAAAGGSGGSGGSDALDDFDLDMLGSDALDDFDLDMLGSDALDDFDLDMLGSDALDDFDLDMLGS

SEQ ID NO: 240 - protein, 538 aa, Artificial sequence
  Synthetic construct
MALPVTALLLPLALLLHAARPEQKLISEEDLDIQMTQTTSSLSASLGDRVTISCRASQDISKYLNWYQQKPDGTVKLLIYHTSRLHSGVPSRFSGSGSGTDYSLTISNLEQEDIATYFCQQGNTLPYTFGGGTKLEITGGGGSGGGGSGGGGSEVKLQESGPGLVAPSQSLSVTCTVSGVSLPDYGVSWIRQPPRKGLEWLGVIWGSETTYYNSALKSRLTIIKDNSKSQVFLKMNSLQTDDTAIYYCAKHYYYGGSYAMDYWGQGTSVTVSSTTTPAPRPPTPAPTIASQPLSLRPEACIATVVIIISVCMLVFVVAMGVYRKRRRMKLLSSIEQACDICRLKKLKCSKEKPKCAKCLKNNWECRYSPKTKRSPLTRAHLTEVESRLERLEQLFLLIFPREDLDMILKMDSLQDIKALLTGLFVQDNVNKDAVTDRLASVETDMPLTLRQHRISATSSSEESSNKGQRQLTVSAAAGGSGGSGGSDALDDFDLDMLGSDALDDFDLDMLGSDALDDFDLDMLGSDALDDFDLDMLGS

SEQ ID NO: 241 - protein, 21 aa, Artificial sequence
  Synthetic construct
ATVVIVVCVSFLVFMIILGVF

SEQ ID NO: 242 - protein, 22 aa, Artificial sequence
  Synthetic construct
IATVVIIISVCMLVFVVAMGVY

What is claimed is:

1. A chimeric polypeptide comprising, from N-terminus to C-terminus:
a) an extracellular ligand-binding domain having a binding affinity for a selected ligand;
b) a linking polypeptide having:
(i) at least about 80% sequence identity to a Notch juxtamembrane domain (JMD);
(ii) at least about 80% sequence identity to a Notch JMD wherein the LIN-12-Notch repeat (LNR) and/or a heterodimerization domain (HD) of a Notch receptor has been deleted;
(iii) at least about 80% sequence identity to a polypeptide hinge domain;
(iv) at least about 80% sequence identity to a Robol JMD including at least one fibronectin repeat; or
(v) a polypeptide having about 2 to about 40 amino acids;
c) a transmembrane domain (TMD) comprising one or more ligand-inducible proteolytic cleavage sites;
d) a stop-transfer sequence (STS), wherein the STS is heterologous to the TMD;
and
e) an intracellular domain comprising a transcriptional regulator, wherein binding of the selected ligand to the extracellular ligand-binding domain induces cleavage at the ligand-inducible proteolytic cleavage site between the transcriptional regulator and the linking polypeptide.

2. The chimeric polypeptide of claim 1, wherein the STS comprises an amino acid sequence having at least about 80% sequence identity to any one of SEQ ID NOs: 100-174 and 207.

3. The chimeric polypeptide of either claim 1 or 2, wherein the STS comprises an amino acid sequence having at least about 90% sequence identity to any one of SEQ ID NOs:
100-174 and 207.

4. The chimeric polypeptide of any one of claims 1 to 3, wherein the STS comprises an amino acid sequence having at least about 95% sequence identity to any one of SEQ ID NOs: 100-174 and 207.

5. The chimeric polypeptide of any one of claims 1 to 4, wherein the STS comprises an amino acid sequence that differs by no more than one amino acid from any one of SEQ ID NOs: 100-102, 104-113, 115-116, 118-174, and 207.

6. The chimeric polypeptide of any one of claims 1 to 5, wherein the STS comprises an amino acid sequence having at least about 80% sequence identity to any one of SEQ ID NOs: 105, 107, 123, 143, 146, 153-155, 161, 163, 164, 166, 171, 172, 174, and 207.

7. The chimeric polypeptide of any one of claims 1 to 6, wherein the STS comprises an amino acid sequence having at least about 90% sequence identity to any one of SEQ ID NOs: 105, 107, 123, 143, 146, 153-155, 161, 163, 164, 166, 171, 172, 174, and 207.

8. The chimeric polypeptide of any one of claims 1 to 7, wherein the STS comprises an amino acid sequence having at least about 95% sequence identity to any one of SEQ ID NOs: 105, 107, 123, 143, 146, 153-155, 161, 163, 164, 166, 171, 172, 174, and 207.

9. The chimeric polypeptide of any one of claims 1 to 8, wherein the STS comprises an amino acid sequence that differs by no more than one amino acid from any one of SEQ ID NOs: 105, 107, 123, 143, 146, 153-155, 161, 163, 164, 166, 171, 172, 174, and 207.

10. The chimeric polypeptide of any one of claims 1 to 9, wherein the STS is selected from the group of STS sequences consisting of APLP1, APLP2, APP, TGBR3, CSF1R, CXCL16, CX3CL1, DAG1, DCC, DNER, DSG2, CDH1, GHR, HLA-A, IFNAR2, IGF1R, IL1R1, ERN2, KCNE1, KCNE2, CHL1, LRP1, LRP2, PTPRF, SCN1B, SCN3B, NPR3, NGFR, PLXDC2, PAM, AGER, ROBO1, SORCS3, SORCS1, SORL1, SDC1, SDC2, SPN, TYR, TYRP1, DCT, VASN, FLT1, CDHS, PKHD1, NECTIN1, KL, IL6R, EFNB1, CD44, CLSTN1, LRP8, PCDHGC3, NRG1, LRP1B, JAG2, EFNB2, DLL1, CLSTN2, EPCAM, ErbB4, KCNE3, CDH2, NRG2, PTPRK, BTC, EPHA4, IL1R2, KCNE4, SCN2B, Nradd, PTPRM, Notch1, Notch2, Notch3, and Notch4.

11. The chimeric polypeptide of any one of claims 1 to 10, wherein the extracellular domain comprises an antigen-binding moiety capable of binding to a ligand on the surface of a cell.

12. The chimeric polypeptide any one of claims 1 to 11, wherein the cell is a pathogen.

13. The chimeric polypeptide of any one of claims 1 to 12, wherein the ligand comprises a protein or a carbohydrate.

14. The chimeric polypeptide of any one of claims 1 to 13, wherein the ligand is selected from the group consisting of CD1, CD1a, CD1b, CD1c, CD1d, CD1e, CD2, CD3d, CD3e, CD3g, CD4, CD5, CD7, CD8a, CD8b, CD19, CD20, CD21, CD22, CD23, CD25, CD27, CD28, CD33, CD34, CD40, CD45, CD48, CD52, CD59, CD66, CD70, CD71, CD72, CD73, CD79A, CD79B, CD80 (B7.1), CD86 (B7.2), CD94, CD95, CD134, CD140 (PDGFR4), CD152, CD154, CD158, CD178, CD181 (CXCR1), CD182 (CXCR2), CD183 (CXCR3), CD210, CD246, CD252, CD253, CD261, CD262, CD273 (PD-L2), CD274 (PD-L1), CD276 (B7H3), CD279, CD295, CD339 (JAG1), CD340 (HER2), EGFR, FGFR2, CEA, AFP, CA125, MUC-1, and MAGE, alkaline phosphatase, placental-like 2 (ALPPL2), B-cell maturation antigen (BCMA), green fluorescent protein (GFP), enhanced green fluorescent protein (eGFP), and signal regulatory protein α (SIRPα).

15. The chimeric polypeptide of any one of claims 1 to 14, wherein the ligand is selected from cell surface receptors, adhesion proteins, integrins, mucins, lectins, tumor associated antigens, and tumor-specific antigens.

16. The chimeric polypeptide of any one of claims 1 to 15, wherein the ligand is a tumor-associated antigen or a tumor-specific antigen.

17. The chimeric polypeptide of any one of claims 1 to 16, wherein the extracellular ligand-binding domain comprises the ligand-binding portion of a receptor.

18. The chimeric polypeptide of any one of claims 1 to 17, wherein the antigen-binding moiety is selected from the group consisting of an antibody, a nanobody, a diabody, a triabody, or a minibody, a F(ab′)2 fragment, a Fab fragment, a single chain variable fragment (scFv), a single domain antibody (sdAb), or a functional fragment of an antibody.

19. The chimeric polypeptide of claim 18, wherein the antigen-binding moiety comprises an scFv.

20. The chimeric polypeptide of any one of claims 11 to 19, wherein the antigen-binding moiety is a tumor-associated antigen selected from the group consisting of CD19, B7H3 (CD276), BCMA (CD269), ALPPL2, CD123, CD171, CD179a, CD20, CD213A2, CD22, CD24, CD246, CD272, CD30, CD33, CD38, CD44v6, CD46, CD71, CD97, CEA, CLDN6, CLECL1, CS-1, EGFR, EGFRvIII, ELF2M, EpCAM, EphA2, Ephrin B2, FAP, FLT3, GD2, GD3, GM3, GPRC5D, HER2 (ERBB2/neu), IGLL1, IL-11Rα, KIT (CD117), MUC1, NCAM, PAP, PDGFR-β, PRSS21, PSCA, PSMA, ROR1, SIRPα, SSEA-4, TAG72, TEM1/CD248, TEM7R, TSHR, VEGFR2, ALPI, citrullinated vimentin, cMet, and Axl.

21. The chimeric polypeptide of claim 20, wherein the tumor-associated antigen is CD19, CEA, HER2, MUC1, CD20, ALPPL2, or EGFR.

22. The chimeric polypeptide of claim 21, wherein the tumor-associated antigen is CD19.

23. The chimeric polypeptide of any one of claims 1 to 22, wherein the ligand-inducible proteolytic cleavage site is a y secretase cleavage site.

24. The chimeric polypeptide of any one of claims 1 to 23, wherein the transcriptional regulator comprises a transcriptional activator, or a transcriptional repressor.

25. The chimeric polypeptide of any one of claims 1 to 24, wherein the intracellular domain comprises a nuclear localization sequence and a transcriptional regulator sequence selected from Gal4-VP16, Gal4-VP64, tetR-VP64, ZFHD1-VP64, Gal4-KRAB, and HAP1-VP16.

26. The chimeric polypeptide of any one of claims 1 to 25, further comprising a signal sequence, a detectable label, a tumor-specific cleavage site, a disease-specific cleavage site, or a combination thereof.

27. The chimeric polypeptide of any one of claims 1 to 19, wherein the linking polypeptide comprises an amino acid sequence having at least 80% sequence identity to any one of SEQ ID NOS: 178-180 and 183-198.

28. The chimeric polypeptide of claim 27, wherein the linking polypeptide comprises an amino acid sequence having at least 90% sequence identity to any one of SEQ ID NOS: 178-180 and 183-198.

29. The chimeric polypeptide of claim 29, wherein the linking polypeptide comprises an amino acid sequence having at least 95% sequence identity to any one of SEQ ID NOS: 178-180 and 183-198.

30. The chimeric polypeptide of claim 29, wherein the linking polypeptide comprises an amino acid sequence substantially identical to any one of SEQ ID NOS: 178-180 and 183-198.

31. The chimeric polypeptide of claim 30, wherein the TMD comprises an amino acid sequence substantially identical to either of SEQ ID NOS: 181, 206, 241, and 242.

32. The chimeric polypeptide of claim 32, wherein the TMD comprises an amino acid sequence having at least 90% sequence identity to either of SEQ ID NOS: 181, 206, 241, and 242.

33. The chimeric polypeptide of any one of claims 1 to 33, wherein the TMD comprises an amino acid sequence having at least 95% sequence identity to either of SEQ ID NOS: 181, 206, 241, and 242.

34. The chimeric polypeptide of any one of claims 1 to 33, wherein the TMD comprises an amino acid sequence substantially identical to either of SEQ ID NOS: 181, 206, 241, and 242.

35. The chimeric polypeptide of any one of claims 1 to 34, wherein:
a) the linking polypeptide comprises an amino acid sequence having at least 80% sequence identity to any one of SEQ ID NOS: 178-180 and 183-198;
b) the TMD comprises an amino acid sequence having at least 80% sequence identity to any one of SEQ ID NO: 181, 206, 241, and 242; and
c) the stop transfer sequence domain comprises an amino acid sequence having at least 80% sequence identity to SEQ ID NO: 100-174 and 207.

36. The chimeric polypeptide of any one of claims 1 to 35, wherein the chimeric polypeptide comprises an amino acid sequence having at least 80% sequence identity to any one of SEQ ID NOS: 1-99.

37. A recombinant nucleic acid comprising a nucleotide sequence encoding a chimeric polypeptide according to any one of claims 1 to 29.

38. The recombinant nucleic acid of claim 30, wherein the nucleotide sequence is incorporated into an expression cassette or an expression vector.

39. The recombinant nucleic acid of claim 31, wherein the expression vector is a viral vector.

40. The recombinant nucleic acid of claim 32, wherein the viral vector is a lentiviral vector, an adenovirus vector, an adeno-associated virus vector, or a retroviral vector.

41. A recombinant cell comprising:
a) a chimeric polypeptide according to any one of claims 1 to 29; and/or
b) a recombinant nucleic acid according to any one of claims 30 to 33.

42. The recombinant cell of claim 41, wherein the cell is a mammalian cell.

43. The recombinant cell of claim 35, wherein the mammalian cell is an immune cell, a neuron, an epithelial cell, and endothelial cell, or a stem cell.

44. The recombinant cell of claim 36, wherein the immune cell is a B cell, a monocyte, a natural killer cell, a basophil, an eosinophil, a neutrophil, a dendritic cell, a macrophage, a regulatory T cell, a helper T cell, a cytotoxic T cell, or other T cell.

45. The recombinant cell of any one of claims 34 to 37, further comprising:
a) a second chimeric polypeptide according to any one of claims 1 to 29; and/or
b) a second nucleic acid according to any one of claims 30 to 33;
wherein the first chimeric polypeptide and the second chimeric polypeptide do not have the same sequence, and/or the first nucleic acid or the second nucleic acid do not have the same sequence.

46. The recombinant cell of claim 38, wherein the first chimeric polypeptide modulates the expression and/or activity of the second chimeric polypeptide.

47. The recombinant cell of any one of claims 34 to 39, further comprising:
a) an expression cassette encoding a protein of interest operably linked to a promoter, wherein expression of the protein is modulated by the chimeric receptor transcriptional regulator.

48. The recombinant cell of claim 40, wherein the protein of interest is heterologous to the cell.

49. The recombinant cell of claim 40 or 41, wherein the promoter is GAL4.

50. The recombinant cell of claim 39 or 49, wherein the protein of interest is a cytokine, a cytotoxin, a chemokine, an immunomodulator, a pro-apoptotic factor, an anti-apoptotic factor, a hormone, a differentiation factor, a dedifferentiation factor, an immune cell receptor, or a reporter.

51. A cell culture comprising a recombinant cell according to any one of claims 41 to 50, and a culture medium.

52. A pharmaceutical composition comprising a pharmaceutically acceptable carrier, and one or more of the following:
a) a recombinant nucleic acid according to any one of claims 37 to 40; or
b) a recombinant cell according to any one of claims 41 to 50.

53. The pharmaceutical composition of claim 52, wherein the composition comprises a recombinant nucleic acid according to any one of claims 37 to 40, and a pharmaceutically acceptable carrier.

54. The pharmaceutical composition of claim 53, wherein the recombinant nucleic acid is encapsulated in a viral capsid or a lipid nanoparticle.

55. A method for modulating an activity of a cell, the method comprising:
a) providing a recombinant cell according to any one of claims 41 to 50; and
b) contacting the recombinant cell with the selected ligand, wherein binding of the selected ligand to the extracellular ligand-binding domain induces cleavage of a ligand-inducible proteolytic cleavage site and releases the transcriptional regulator, wherein the released transcriptional regulator modulates an activity of the recombinant cell.

56. The method of claim 55, the contacting is carried out in vivo, ex vivo, or in vitro.

57. The method of any one of claims 55 to 56, wherein the activity of the cell is selected from the group consisting of: expression of a selected gene of the cell, proliferation of the cell, apoptosis of the cell, non-apoptotic death of the cell, differentiation of the cell, dedifferentiation of the cell, migration of the cell, secretion of a molecule from the cell, cellular adhesion of the cell, and cytolytic activity of the cell.

58. The method of any one of claims 55 to 57, wherein the released transcriptional regulator modulates expression of a gene product of the cell.

59. The method of any one of claims 55 to 58, wherein the released transcriptional regulator modulates expression of a heterologous gene product.

60. The method of any one of claims 55 to 59, wherein the gene product of the cell is selected from the group consisting of a chemokine, a chemokine receptor, a chimeric antigen receptor, a cytokine, a cytokine receptor, a differentiation factor, a growth factor, a growth factor receptor, a hormone, a metabolic enzyme, a pathogen derived protein, a proliferation inducer, a receptor, an RNA guided nuclease, a site-specific nuclease, a T cell receptor, a toxin, a toxin derived protein, a transcriptional activator, a transcriptional repressor, a translation regulator, a translational activator, a translational repressor, an activating immuno-receptor, an antibody, an apoptosis inhibitor, an apoptosis inducer, an engineered T cell receptor, an immuno-activator, an immuno-inhibitor, and an inhibiting immuno-receptor.

61. The method of any one of claims 55 to 60, wherein the released transcriptional regulator modulates differentiation of the cell, and wherein the cell is an immune cell, a stem cell, a progenitor cell, or a precursor cell.

62. A method for inhibiting a target cell in an individual, the method comprising administering to the individual an effective number of the recombinant cell according to any one of claims 41 to 50, wherein the recombinant cell inhibits the target cell in the individual.

63. The method of claim 62, wherein the target cell is an acute myeloma leukemia cell, an anaplastic lymphoma cell, an astrocytoma cell, a B-cell cancer cell, a breast cancer cell, a colon cancer cell, an ependymoma cell, an esophageal cancer cell, a glioblastoma cell, a glioma cell, a leiomyosarcoma cell, a liposarcoma cell, a liver cancer cell, a lung cancer cell, a mantle cell lymphoma cell, a melanoma cell, a neuroblastoma cell, a non-small cell lung cancer cell, an oligodendroglioma cell, an ovarian cancer cell, a pancreatic cancer cell, a peripheral T cell lymphoma cell, a renal cancer cell, a sarcoma cell, a stomach cancer cell, a carcinoma cell, a mesothelioma cell, or a sarcoma cell.

64. The method of claim 62, wherein the target cell is a pathogenic cell.

65. A method for the treatment of a health condition in an individual in need thereof, the method comprising: administering to the individual a first therapy comprising an effective number of the recombinant cell according to any one of claims 41 to 50, wherein the recombinant cell treats the health condition in the individual.

66. The method of claim 65, further comprising administering to the individual a second therapy.

67. The method of claim 66, wherein the second therapy is selected from the group consisting of chemotherapy, radiotherapy, immunotherapy, hormonal therapy, or toxin therapy.

68. The method of any one of claims 65 to 67, wherein the first therapy and the second therapy are administered together, in the same composition or in separate compositions.

69. The method claim 68, wherein the first therapy and the second therapy are administered at the same time.

70. The method of any one of claims 66 to 67, wherein the first therapy and the second therapy are administered sequentially.

71. The method of claim 70, wherein the first therapy is administered before the second therapy.

72. The method of claim 70, wherein the first therapy is administered after the second therapy.

73. The method of claim 70, wherein the first therapy and the second therapy are administered in rotation.

74. A system for modulating an activity of a cell, inhibiting a target cancer cell, or treating a health condition in an individual in need thereof, wherein the system comprises one or more of the following:
a) a chimeric polypeptide according to any one of claims 1 to 36;
b) a recombinant nucleic acid according to any one of claims 37 to 40;
c) a recombinant cell according to any one of claims 41 to 50; and
d) a pharmaceutical composition according to any one of claims 52 to 54.

75. A method for making the recombinant cell according to any one of claims 41 to 50, comprising:
a) providing a cell capable of protein expression; and
b) contacting the provided cell with a recombinant nucleic acid according to any one of claims 37 to 40.

76. The method of claim 75, wherein the cell is obtained by leukapheresis performed on a sample obtained from a human subject, and the cell is contacted ex vivo.

77. The method of claim 75, wherein the recombinant nucleic acid is encapsulated in a viral capsid or a lipid nanoparticle.

78. The use of one or more of the following for the treatment of a health condition:
a) a chimeric polypeptide according to any one of claims 1 to 36;
b) a recombinant nucleic acid according to any one of claims 37 to 40;
c) a recombinant cell according to any one of claims 41 to 50; and
d) a composition according to any one of claims 52 to 54.

79. The use of claim 78, wherein the health condition is cancer.

80. The use of the invention of any one of claims 1 to 79, for the manufacture of a medicament for the treatment of a health condition.
